(19) United States
(12) Patent Application Publication
(10) Pub. No.: US 2003/0235883 A1
(43) Pub. Date: Dec. 25, 2003

(54) Novel nucleic acids and polypeptides

(76) Inventors: Y. Tom Tang, San Jose, CA (US); Chenghua Liu, San Jose, CA (US); Yonghong Yang, San Jose, CA (US); Radoje T. Drmanac, Palo Alto, CA (US); Jie Zhang, Campbell, CA (US); Rui-hong Chen, Foster City, CA (US); Aidong Xue, Sunnyvale, CA (US); Vinod Asundi, Foster City, CA (US); Chongjun Xu, San Jose, CA (US); Feiyan Ren, Cupertino, CA (US); Ping Zhou, Cupertino, CA (US); Qing A. Zhao, San Jose, CA (US); Jian-Rui Wang, Cupertino, CA (US); Ryle Goodrich, Los Angeles, CA (US); Dunrui Wang, Poway, CA (US)

Correspondence Address: NUVELO, 675 ALMANOR AVE., SUNNYVALE, CA, 94085, US

(21) Appl. No.: 10/240,145

(22) PCT Filed: Mar. 30, 2001
(86) PCT No.: PCT/US01/10484

(51) Int. Cl. C07K 14/435; C07H 21/04; C12N 15/00; C12P 21/02; C12N 5/06

(52) U.S. Cl. 435/69.1; 435/320.1; 435/325; 530/350; 536/23.5

(57) ABSTRACT

The present invention provides novel nucleic acids, novel polypeptide sequences encoded by these nucleic acids and uses thereof.

### 1. TECHNICAL FIELD

[0001] The present invention provides novel polynucleotides and proteins encoded by such polynucleotides, along with uses for these polynucleotides and proteins, for example in therapeutic, diagnostic and research methods.

### 2. BACKGROUND

[0002] Technology aimed at the discovery of protein factors (including e.g., cytokines, such as lymphokines, interferons, CSFs, chemokines, and interleukins) has matured rapidly over the past decade. The now routine hybridization cloning and expression cloning techniques clone novel polynucleotides “directly” in the sense that they rely on information directly related to the discovered protein (i.e., partial DNA/amino acid sequence of the protein in the case of hybridization cloning; activity of the protein in the case of expression cloning). More recent “indirect” cloning techniques such as signal sequence cloning, which isolates DNA sequences based on the presence of a now well-recognized secretory leader sequence motif, as well as various PCR-based or low stringency-hybridization-based cloning techniques, have advanced the state of the art by making available large numbers of DNA/amino acid sequences for proteins that are known to have biological activity, for example, by virtue of their secreted nature in the case of leader sequence cloning, by virtue of their cell or tissue source in the case of PCR-based techniques, or by virtue of structural similarity to other genes of known biological activity.

[0003] Identified polynucleotide and polypeptide sequences have numerous applications in, for example, diagnostics, forensics, gene mapping; identification of mutations responsible for genetic disorders or other traits, to assess biodiversity, and to produce many other types of data and products dependent on DNA and amino acid sequences.

### 3. SUMMARY OF THE INVENTION

[0004] The compositions of the present invention include novel isolated polypeptides, novel isolated polynucleotides encoding such polypeptides, including recombinant DNA molecules, cloned genes or degenerate variants thereof, especially naturally occurring variants such as allelic variants, antisense polynucleotide molecules, and antibodies that specifically recognize one or more epitopes present on such polypeptides, as well as hybridomas producing such antibodies.

[0005] The compositions of the present invention additionally include vectors, including expression vectors, containing the polynucleotides of the invention, cells genetically engineered to contain such polynucleotides and cells genetically engineered to express such polynucleotides.

[0006] The present invention relates to a collection or library of at least one novel nucleic acid sequence assembled from expressed sequence tags (ESTs) isolated mainly by sequencing by hybridization (SBH), and in some cases, sequences obtained from one or more public databases. The invention relates also to the proteins encoded by such polynucleotides, along with therapeutic, diagnostic and research utilities for these polynucleotides and proteins. These nucleic acid sequences are designated as SEQ ID NO: 1-43, or 87-129. The polypeptides sequences are designated SEQ ID NO: 44-86, or 130-172. The nucleic acids and polypeptides are provided in the Sequence Listing. In the nucleic acids provided in the Sequence Listing, A is adenosine; C is cytosine; G is guanine; T is thymine; and N is any of the four bases. In the amino acids provided in the Sequence Listing, * corresponds to the stop codon.

[0007] The nucleic acid sequences of the present invention also include, nucleic acid sequences that hybridize to the complement of SEQ ID NO: 1-43, or 87-129 under stringent hybridization conditions; nucleic acid sequences which are allelic variants or species homologues of any of the nucleic acid sequences recited above, or nucleic acid sequences that encode a peptide comprising a specific domain or truncation of the peptides encoded by SEQ ID NO: 1-43, or 87-129. A polynucleotide comprising a nucleotide sequence having at least 90% identity to an identifying sequence of SEQ ID NO: 1-43, or 87-129 or a degenerate variant or fragment thereof. The identifying sequence can be 100 base pairs in length.

[0008] The nucleic acid sequences of the present invention also include the sequence information from the nucleic acid sequences of SEQ ID NO: 1-43, or 87-129. The sequence information can be a segment of any one of SEQ ID NO: 1-43, or 87-129 that uniquely identifies or represents the sequence information of SEQ ID NO: 1-43, or 87-129.

[0009] A collection as used in this application can be a collection of only one polynucleotide. The collection of sequence information or identifying information of each sequence can be provided on a nucleic acid array. In one embodiment, segments of sequence information is provided on a nucleic acid array to detect the polynucleotide that contains the segment. The array can be designed to detect full-match or mismatch to the polynucleotide that contains the segment. The collection can also be provided in a computer-readable format.

[0010] This invention also includes the reverse or direct complement of any of the nucleic acid sequences recited above; cloning or expression vectors containing the nucleic acid sequences; and host cells or organisms transformed with these expression vectors. Nucleic acid sequences (or their reverse or direct complements) according to the invention have numerous applications in a variety of techniques known to those skilled in the art of molecular biology, such as use as hybridization probes, use as primers for PCR, use in an array, use in computer-readable media, use in sequencing full-length genes, use for chromosome and gene mapping, use in the recombinant production of protein, and use in the generation of anti-sense DNA or RNA, their chemical analogs and the like.

[0011] In a preferred embodiment, the nucleic acid sequences of SEQ ID NO: 1-43, or 87-129 or novel segments or parts of the nucleic acids of the invention are used as primers in expression assays that are well known in the art. In a particularly preferred embodiment, the nucleic acid sequences of SEQ ID NO: 1-43, or 87-129 or novel segments or parts of the nucleic acids provided herein are used in diagnostics for identifying expressed genes or, as well known in the art and exemplified by Vollrath et al., Science 258:52-59 (1992), as expressed sequence tags for physical mapping of the human genome.

[0012] The isolated polynucleotides of the invention include, but are not limited to, a polynucleotide comprising any one of the nucleotide sequences set forth in SEQ ID NO: 1-43, or 87-129; a polynucleotide comprising any of the full length protein coding sequences of SEQ ID NO: 1-43, or 87-129; and a polynucleotide comprising any of the nucleotide sequences of the mature protein coding sequences of SEQ ID NO: 1-43, or 87-129. The polynucleotides of the present invention also include, but are not limited to, a polynucleotide that hybridizes under stringent hybridization conditions to (a) the complement of any one of the nucleotide sequences set forth in SEQ ID NO: 1-43, or 87-129; (b) a nucleotide sequence encoding any one of the amino acid sequences set forth in the Sequence Listing; (c) a polynucleotide which is an allelic variant of any polynucleotides recited above; (d) a polynucleotide which encodes a species homolog (e.g. orthologs) of any of the proteins recited above; or (e) a polynucleotide that encodes a polypeptide comprising a specific domain or truncation of any of the polypeptides comprising an amino acid sequence set forth in the Sequence Listing.

[0013] The isolated polypeptides of the invention include, but are not limited to, a polypeptide comprising any of the amino acid sequences set forth in SEQ ID NO: 41-86, or 130-172; or the corresponding full length or mature protein. Polypeptides of the invention also include polypeptides with biological activity that are encoded by (a) any of the polynucleotides having a nucleotide sequence set forth in SEQ ID NO: 1-43, or 87-129; or (b) polynucleotides that hybridize to the complement of the polynucleotides of (a) under stringent hybridization conditions. Biologically or immunologically active variants of any of the polypeptide sequences in the Sequence Listing, and “substantial equivalents” thereof (e.g., with at least about 65%, 70%, 75%, 80%, 85%, 90%, 95%, 98% or 99% amino acid sequence identity) that preferably retain biological activity are also contemplated. The polypeptides of the invention may be wholly or partially chemically synthesized but are preferably produced by recombinant means using the genetically engineered cells (e.g. host cells) of the invention.

[0014] The invention also provides compositions comprising a polypeptide of the invention. Polypeptide compositions of the invention may further comprise an acceptable carrier, such as a hydrophilic, e.g., pharmaceutically acceptable, carrier.

[0015] The invention also provides host cells transformed or transfected with a polynucleotide of the invention.

[0016] The invention also relates to methods for producing a polypeptide of the invention comprising growing a culture of the host cells of the invention in a suitable culture medium under conditions permitting expression of the desired polypeptide, and purifying the polypeptide from the culture or from the host cells. Preferred embodiments include those in which the protein produced by such process is a mature form of the protein.

[0017] Polynucleotides according to the invention have numerous applications in a variety of techniques known to those skilled in the art of molecular biology. These techniques include use as hybridization probes, use as oligomers, or primers, for PCR, use for chromosome and gene mapping, use in the recombinant production of protein, and use in generation of anti-sense DNA or RNA, their chemical analogs and the like. For example, when the expression of an mRNA is largely restricted to a particular cell or tissue type, polynucleotides of the invention can be used as hybridization probes to detect the presence of the particular cell or tissue mRNA in a sample using, e.g., in situ hybridization.

[0018] In other exemplary embodiments, the polynucleotides are used in diagnostics as expressed sequence tags for identifying expressed genes or, as well known in the art and exemplified by Vollrath et al., Science 258:52-59 (1992), as expressed sequence tags for physical mapping of the human genome.

[0019] The polypeptides according to the invention can be used in a variety of conventional procedures and methods that are currently applied to other proteins. For example, a polypeptide of the invention can be used to generate an antibody that specifically binds the polypeptide. Such antibodies, particularly monoclonal antibodies, are useful for detecting or quantitating the polypeptide in tissue. The polypeptides of the invention can also be used as molecular weight markers, and as a food supplement.

[0020] Methods are also provided for preventing, treating, or ameliorating a medical condition which comprises the step of administering to a mammalian subject a therapeutically effective amount of a composition comprising a polypeptide of the present invention and a pharmaceutically acceptable carrier.

[0021] In particular, the polypeptides and polynucleotides of the invention can be utilized, for example, in methods for the prevention and/or treatment of disorders involving aberrant protein expression or biological activity.

[0022] The present invention further relates to methods for detecting the presence of the polynucleotides or polypeptides of the invention in a sample. Such methods can, for example, be utilized as part of prognostic and diagnostic evaluation of disorders as recited herein and for the identification of subjects exhibiting a predisposition to such conditions. The invention provides a method for detecting the polynucleotides of the invention in a sample, comprising contacting the sample with a compound that binds to and forms a complex with the polynucleotide of interest for a period sufficient to form the complex and under conditions sufficient to form a complex and detecting the complex such that if a complex is detected, the polynucleotide of interest is detected. The invention also provides a method for detecting the polypeptides of the invention in a sample comprising contacting the sample with a compound that binds to and forms a complex with the polypeptide under conditions and for a period sufficient to form the complex and detecting the formation of the complex such that if a complex is formed, the polypeptide is detected.

[0023] The invention also provides kits comprising polynucleotide probes and/or monoclonal antibodies, and optionally quantitative standards, for carrying out methods of the invention. Furthermore, the invention provides methods for evaluating the efficacy of drugs, and monitoring the progress of patients, involved in clinical trials for the treatment of disorders as recited above.

[0024] The invention also provides methods for the identification of compounds that modulate (i.e., increase or decrease) the expression or activity of the polynucleotides and/or polypeptides of the invention. Such methods can be utilized, for example, for the identification of compounds that can ameliorate symptoms of disorders as recited herein. Such methods can include, but are not limited to, assays for identifying compounds and other substances that interact with (e.g., bind to) the polypeptides of the invention. The invention provides a method for identifying a compound that binds to the polypeptides of the invention comprising contacting the compound with a polypeptide of the invention in a cell for a time sufficient to form a polypeptide/compound complex, wherein the complex drives expression of a reporter gene sequence in the cell; and detecting the complex by detecting the reporter gene sequence expression such that if expression of the reporter gene is detected the compound the binds to a polypeptide of the invention is identified.

[0025] The methods of the invention also provide methods for treatment which involve the administration of the polynucleotides or polypeptides of the invention to individuals exhibiting symptoms or tendencies. In addition, the invention encompasses methods for treating diseases or disorders as recited herein comprising administering compounds and other substances that modulate the overall activity of the target gene products. Compounds and other substances can effect such modulation either on the level of target gene/protein expression or target protein activity.

[0026] The polypeptides of the present invention and the polynucleotides encoding them are also useful for the same functions known to one of skill in the art as the polypeptides and polynucleotides to which they have homology (set forth in Table 2); for which they have a signature region (as set forth in Table 3); or for which they have homology to a gene family (as set forth in Table 4). If no homology is set forth for a sequence, then the polypeptides and polynucleotides of the present invention are useful for a variety of applications, as described herein, including use in arrays for detection.

### 4. DETAILED DESCRIPTION OF THE INVENTION

[0027] 4.1 Definitions

[0028] It must be noted that as used herein and in the appended claims, the singular forms “a”, “an” and “the” include plural references unless the context clearly dictates otherwise.

[0029] The term “active” refers to those forms of the polypeptide which retain the biologic and/or immunologic activities of any naturally occurring polypeptide. According to the invention, the terms “biologically active” or “biological activity” refer to a protein or peptide having structural, regulatory or biochemical functions of a naturally occurring molecule. Likewise “immunologically active” or “immunological activity” refers to the capability of the natural, recombinant or synthetic polypeptide to induce a specific immune response in appropriate animals or cells and to bind with specific antibodies.

[0030] The term “activated cells” as used in this application are those cells which are engaged in extracellular or intracellular membrane trafficking, including the export of secretory or enzymatic molecules as part of a normal or disease process.

[0031] The terms “complementary” or “complementarity” refer to the natural binding of polynucleotides by base pairing. For example, the sequence 5′-AGT-3′ binds to the complementary sequence 3′-TCA-5′. Complementarity between two single-stranded molecules may be “partial” such that only some of the nucleic acids bind or it may be “complete” such that total complementarity exists between the single stranded molecules. The degree of complementarity between the nucleic acid strands has significant effects on the efficiency and strength of the hybridization between the nucleic acid strands.

[0032] The term “embryonic stem cells (ES)” refers to a cell that can give rise to many differentiated cell types in an embryo or an adult, including the germ cells. The term “germ line stem cells (GSCs)” refers to stem cells derived from primordial stem cells that provide a steady and continuous source of germ cells for the production of gametes. The term “primordial germ cells (PGCs)” refers to a small population of cells set aside from other cell lineages particularly from the yolk sac, mesenteries, or gonadal ridges during embryogenesis that have the potential to differentiate into germ cells and other cells. PGCs are the source from which GSCs and ES cells are derived. The PGCs, the GSCs and the ES cells are capable of self-renewal. Thus these cells not only populate the germ line and give rise to a plurality of terminally differentiated cells that comprise the adult specialized organs, but are able to regenerate themselves.

[0033] The term “expression modulating fragment,” EMF, means a series of nucleotides which modulates the expression of an operably linked ORF or another EMF.

[0034] As used herein, a sequence is said to “modulate the expression of an operably linked sequence” when the expression of the sequence is altered by the presence of the EMF. EMFs include, but are not limited to, promoters, and promoter modulating sequences (inducible elements). One class of EMFs are nucleic acid fragments which induce the expression of an operably linked ORF in response to a specific regulatory factor or physiological event.

[0035] The terms “nucleotide sequence” or “nucleic acid” or “polynucleotide” or “oligonculeotide” are used interchangeably and refer to a heteropolymer of nucleotides or the sequence of these nucleotides. These phrases also refer to DNA or RNA of genomic or synthetic origin which may be single-stranded or double-stranded and may represent the sense or the antisense strand, to peptide nucleic acid (PNA) or to any DNA-like or RNA-like material. In the, sequences herein A is adenine, C is cytosine, T is thymine, G is guanine and N is A, C, G or T (U). It is contemplated that where the polynucleotide is RNA, the T (thymine) in the sequences provided herein is substituted with U (uracil). Generally, nucleic acid segments provided by this invention may be assembled from fragments of the genome and short oligonucleotide linkers, or from a series of oligonucleotides, or from individual nucleotides, to provide a synthetic nucleic acid which is capable of being expressed in a recombinant transcriptional unit comprising regulatory elements derived from a microbial or viral operon, or a eukaryotic gene.

[0036] The terms “oligonucleotide fragment” or a “polynucleotide fragment”, “portion,” or “segment” or “probe” or “primer” are used interchangeably and refer to a sequence of nucleotide residues which are at least about 5 nucleotides, more preferably at least about 7 nucleotides, more preferably at least about 9 nucleotides, more preferably at least about 11 nucleotides and most preferably at least about 17 nucleotides. The fragment is preferably less than about 500 nucleotides, preferably less than about 200 nucleotides, more preferably less than about 100 nucleotides, more preferably less than about 50 nucleotides and most preferably less than 30 nucleotides. Preferably the probe is from about 6 nucleotides to about 200 nucleotides, preferably from about 15 to about 50 nucleotides, more preferably from about 17 to 30 nucleotides and most preferably from about 20 to 25 nucleotides. Preferably the fragments can be used in polymerase chain reaction (PCR), various hybridization procedures or microarray procedures to identify or amplify identical or related parts of mRNA or DNA molecules. A fragment or segment may uniquely identify each polynucleotide sequence of the present invention. Preferably the fragment comprises a sequence substantially similar to any one of SEQ ID NO: 1-43, or 87-129.

[0037] Probes may, for example, be used to determine whether specific mRNA molecules are present in a cell or tissue or to isolate similar nucleic acid sequences from chromosomal DNA as described by Walsh et al. (Walsh, P. S. et al., 1992, PCR Methods Appl 1:241-250). They may be labeled by nick translation, Klenow fill-in reactions PCR, or other methods well known in the art. Probes of the present invention, their preparation and/or labeling are elaborated in Sambrook, J. et al., 1989, Molecular Cloning: A Laboratory Manual, Cold Spring Harbor Laboratory, NY; or Ausubel, F. M. et al., 1989, Current Protocols in Molecular Biology, John Wiley & Sons, New York N.Y., both of which are incorporated herein by reference in their entirety.

[0038] The nucleic acid sequences of the present invention also include the sequence information from the nucleic acid sequences of SEQ ID NO: 1-43, or 87-129. The sequence information can be a segment of any one of SEQ ID NO: 1-43, or 87-129 that uniquely identifies or represents the sequence information of that sequence of SEQ ID NO: 1-43, or 87-129. One such segment can be a twenty-mer nucleic acid sequence because the probability that a twenty-mer is fully matched in the human genome is 1 in 300. In the human genome, there are three billion base pairs in one set of chromosomes. Because 4²⁰ possible twenty-mers exist, there are 300 times more twenty-mers than there are base pairs in a set of human chromosomes. Using the same analysis, the probability for a seventeen-mer to be fully matched in the human genome is approximately 1 in 5. When these segments are used in arrays for expression studies, fifteen-mer segments can be used. The probability that the fifteen-mer is fully matched in the expressed sequences is also approximately one in five because expressed sequences comprise less than approximately 5% of the entire genome sequence.

[0039] Similarly, when using sequence information for detecting a single mismatch, a segment can be a twenty-five mer. The probability that the twenty-five mer would appear in a human genome with a single mismatch is calculated by multiplying the probability for a full match (1÷4²⁵) times the increased probability for mismatch at each nucleotide position (3×25). The probability that an eighteen mer with a single mismatch can be detected in an array for expression studies is approximately one in five. The probability that a twenty-mer with a single mismatch can be detected in a human genome is approximately one in five.

[0040] The term “open reading frame,” ORF, means a series of nucleotide triplets coding for amino acids without any termination codons and is a sequence translatable into protein.

[0041] The terms “operably linked” or “operably associated” refer to functionally related nucleic acid sequences. For example, a promoter is operably associated or operably linked with a coding sequence if the promoter controls the transcription of the coding sequence. While operably linked nucleic acid sequences can be contiguous and in the same reading frame, certain genetic elements e.g. repressor genes are not contiguously linked to the coding sequence but still control transcription/translation of the coding sequence.

[0042] The term “pluripotent” refers to the capability of a cell to differentiate into a number of differentiated cell types that are present in an adult organism. A pluripotent cell is restricted in its differentiation capability in comparison to a totipotent cell.

[0043] The terms “polypeptide” or “peptide” or “amino acid sequence” refer to an oligopeptide, peptide, polypeptide or protein sequence or fragment thereof and to naturally occurring or synthetic molecules. A polypeptide “fragment,” “portion” or “segment” is a stretch of amino acid residues of at least about 5 amino acids, preferably at least about 7 amino acids, more preferably at least about 9 amino acids and most preferably at least about 17 or more amino acids. The peptide preferably is not greater than about 500 amino acids, more preferably less than 200 amino acids more preferably less than 150 amino acids and most preferably less than 100 amino acids. Preferably the peptide is from about 5 to about 200 amino acids. To be active, any polypeptide must have sufficient length to display biological and/or immunological activity.

[0044] The term “naturally occurring polypeptide” refers to polypeptides produced by cells that have not been genetically engineered and specifically contemplates various polypeptides arising from post-translational modifications of the polypeptide including, but not limited to, acetylation, carboxylation, glycosylation, phosphorylation, lipidation and acylation.

[0045] The term “translated protein coding portion” means a sequence which encodes for the full length protein which may include any leader sequence or any processing sequence.

[0046] The term “mature protein coding sequence” means a sequence which encodes a peptide or protein without a signal or leader sequence. The “mature protein portion” means that portion of the protein which does not include a signal or leader sequence. The peptide may have been produced by processing in the cell which removes any leader/signal sequence. The mature protein portion may or may not include an initial methionine residue. The methionine residue may be removed from the protein during processing in the cell. The peptide may be produced synthetically or the protein may have been produced using a polynucleotide only encoding for the mature protein coding sequence.

[0047] The term “derivative” refers to polypeptides chemically modified by such techniques as ubiquitination, labeling (e.g., with radionuclides or various enzymes), covalent polymer attachment such as pegylation (derivatization with polyethylene glycol) and insertion or substitution by chemical synthesis of amino acids such as ornithine, which do not normally occur in human proteins.

[0048] The term “variant” (or “analog”) refers to any polypeptide differing from naturally occurring polypeptides by amino acid insertions, deletions, and substitutions, created using, e g, recombinant DNA techniques. Guidance in determining which amino acid residues may be replaced, added or deleted without abolishing activities of interest, may be found by comparing the sequence of the particular polypeptide with that of homologous peptides and minimizing the number of amino acid sequence changes made in regions of high homology (conserved regions) or by replacing amino acids with consensus sequence.

[0049] Alternatively, recombinant variants encoding these same or similar polypeptides may be synthesized or selected by making use of the “redundancy” in the genetic code. Various codon substitutions, such as the silent changes which produce various restriction sites, may be introduced to optimize cloning into a plasmid or viral vector or expression in a particular prokaryotic or eukaryotic system. Mutations in the polynucleotide sequence may be reflected in the polypeptide or domains of other peptides added to the polypeptide to modify the properties of any part of the polypeptide, to change characteristics such as ligand-binding affinities, interchain affinities, or degradation/turnover rate.

[0050] Preferably, amino acid “substitutions” are the result of replacing one amino acid with another amino acid having similar structural and/or chemical properties, i.e., conservative amino acid replacements. “Conservative” amino acid substitutions may be made on the basis of similarity in polarity, charge, solubility, hydrophobicity, hydrophilicity, and/or the amphipathic nature of the residues involved. For example, nonpolar (hydrophobic) amino acids include alanine, leucine, isoleucine, valine, proline, phenylalanine, tryptophan, and methionine; polar neutral amino acids include glycine, serine, threonine, cysteine, tyrosine, asparagine, and glutamine; positively charged (basic) amino acids include arginine, lysine, and histidine; and negatively charged (acidic) amino acids include aspartic acid and glutamic acid. “Insertions” or “deletions” are preferably in the range of about 1 to 20 amino acids, more preferably 1 to 10 amino acids. The variation allowed may be experimentally determined by systematically making insertions, deletions, or substitutions of amino acids in a polypeptide molecule using recombinant DNA techniques and assaying the resulting recombinant variants for activity.

[0051] Alternatively, where alteration of function is desired, insertions, deletions or non-conservative alterations can be engineered to produce altered polypeptides. Such alterations can, for example, alter one or more of the biological functions or biochemical characteristics of the polypeptides of the invention. For example, such alterations may change polypeptide characteristics such as ligand-binding affinities, interchain affinities, or degradation/turnover rate. Further, such alterations can be selected so as to generate polypeptides that are better suited for expression, scale up and the like in the host cells chosen for expression. For example, cysteine residues can be deleted or substituted with another amino acid residue in order to eliminate disulfide bridges.

[0052] The terms “purified” or “substantially purified” as used herein denotes that the indicated nucleic acid or polypeptide is present in the substantial absence of other biological macromolecules, e.g., polynucleotides, proteins, and the like. In one embodiment, the polynucleotide or polypeptide is purified such that it constitutes at least 95% by weight, more preferably at least 99% by weight, of the indicated biological macromolecules present (but water, buffers, and other small molecules, especially molecules having a molecular weight of less than 1000 daltons, can be present).

[0053] The term “isolated” as used herein refers to a nucleic acid or polypeptide separated from at least one other component (e.g., nucleic acid or polypeptide) present with the nucleic acid or polypeptide in its natural source. In one embodiment, the nucleic acid or polypeptide is found in the presence of (if anything) only a solvent, buffer, ion, or other component normally present in a solution of the same. The terms “isolated” and “purified” do not encompass nucleic acids or polypeptides present in their natural source.

[0054] The term “recombinant,” when used herein to refer to a polypeptide or protein, means that a polypeptide or protein is derived from recombinant (e.g., microbial, insect, or mammalian) expression systems. “Microbial” refers to recombinant polypeptides or proteins made in bacterial or fungal (e.g., yeast) expression systems. As a product, “recombinant microbial” defines a polypeptide or protein essentially free of native endogenous substances and unaccompanied by associated native glycosylation. Polypeptides or proteins expressed in most bacterial cultures, e.g., E. coli, will be free of glycosylation modifications; polypeptides or proteins expressed in yeast will have a glycosylation pattern in general different from those expressed in mammalian cells.

[0055] The term “recombinant expression vehicle or vector” refers to a plasmid or phage or virus or vector, for expressing a polypeptide from a DNA (RNA) sequence. An expression vehicle can comprise a transcriptional unit comprising an assembly of (1) a genetic element or elements having a regulatory role in gene expression, for example, promoters or enhancers, (2) a structural or coding sequence which is transcribed into mRNA and translated into protein, and (3) appropriate transcription initiation and termination sequences. Structural units intended for use in yeast or eukaryotic expression systems preferably include a leader sequence enabling extracellular secretion of translated protein by a host cell. Alternatively, where recombinant protein is expressed without a leader or transport sequence, it may include an amino terminal methionine residue. This residue may or may not be subsequently cleaved from the expressed recombinant protein to provide a final product.

[0056] The term “recombinant expression system” means host cells which have stably integrated a recombinant transcriptional unit into chromosomal DNA or carry the recombinant transcriptional unit extrachromosomally. Recombinant expression systems as defined herein will express heterologous polypeptides or proteins upon induction of the regulatory elements linked to the DNA segment or synthetic gene to be expressed. This term also means host cells which have stably integrated a recombinant genetic element or elements having a regulatory role in gene expression, for example, promoters or enhancers. Recombinant expression systems as defined herein will express polypeptides or proteins endogenous to the cell upon induction of the regulatory elements linked to the endogenous DNA segment or gene to be expressed. The cells can be prokaryotic or eukaryotic.

[0057] The term “secreted” includes a protein that is transported across or through a membrane, including transport as a result of signal sequences in its amino acid sequence when it is expressed in a suitable host cell. “Secreted” proteins include without limitation proteins secreted wholly (e.g., soluble proteins) or partially (e.g., receptors) from the cell in which they are expressed. “Secreted” proteins also include without limitation proteins that are transported across the membrane of the endoplasmic reticulum. “Secreted” proteins are also intended to include proteins containing non-typical signal sequences (e.g. Interleukin-1 Beta, see Krasney, P. A. and Young, P. R (1992) Cytokine 4(2): 134-143) and factors released from damaged cells (e.g. Interleukin-1 Receptor Antagonist, see Arend, W. P. et. al. (1998) Annu. Rev. Immunol. 16:27-55)

[0058] Where desired, an expression vector may be designed to contain a “signal or leader sequence” which will direct the polypeptide through the membrane of a cell. Such a sequence may be naturally present on the polypeptides of the present invention or provided from heterologous protein sources by recombinant DNA techniques.

[0059] The term “stringent” is used to refer to conditions that are commonly understood in the art as stringent. Stringent conditions can include highly stringent conditions (i.e., hybridization to filter-bound DNA in 0.5 M NaHPO₄, 7% sodium dodecyl sulfate (SDS), 1 mM EDTA at 65° C., and washing in 0.1×SSC/0.1% SDS at 68° C.), and moderately stringent conditions (i.e., washing in 0.2×SSC/0.1% SDS at 42° C.). Other exemplary hybridization conditions are described herein in the examples.

[0060] In instances of hybridization of deoxyoligonucleotides, additional exemplary stringent hybridization conditions include washing in 6×SSC/0.05% sodium pyrophosphate at 37° C. (for 14-base oligonucleotides), 48° C. (for 17-base oligos), 55° C. (for 20-base oligonucleotides), and 60° C. (for 23-base oligonucleotides).

[0061] As used herein, “substantially equivalent” can refer both to nucleotide and amino acid sequences, for example a mutant sequence, that varies from a reference sequence by one or more substitutions, deletions, or additions, the net effect of which does not result in an adverse functional dissimilarity between the reference and subject sequences. Typically, such a substantially equivalent sequence varies from one of those listed herein by no more than about 35% (i.e., the number of individual residue substitutions, additions, and/or deletions in a substantially equivalent sequence, as compared to the corresponding reference sequence, divided by the total number of residues in the substantially equivalent sequence is about 0.35 or less). Such a sequence is said to have 65% sequence identity to the listed sequence. In one embodiment, a substantially equivalent, e.g., mutant, sequence of the invention varies from a listed sequence by no more than 30% (70% sequence identity); in a variation of this embodiment, by no more than 25% (75% sequence identity); and in a further variation of this embodiment, by no more than 20% (80% sequence identity) and in a further variation of this embodiment, by no more than 10% (90% sequence identity) and in a further variation of this embodiment, by no more that 5% (95% sequence identity). Substantially equivalent, e.g., mutant, amino acid sequences according to the invention preferably have at least 80% sequence identity with a listed amino acid sequence, more preferably at least 85% sequence identity, more preferably at least 90% sequence identity, more preferably at least 95% identity, more preferably at least 98% identity, and most preferably at least 99% identity. Substantially equivalent nucleotide sequences of the invention can have lower percent sequence identities, taking into account, for example, the redundancy or degeneracy of the genetic code. Preferably, nucleotide sequence has at least about 65% identity, more preferably at least about 75% identity, more preferably at least about 80% sequence identity, more preferably at least about 85% sequence identity, more preferably at least about 90% sequence identity, and most preferably at least about 95% identity, more preferably at least about 98% sequence identity, and most preferably at least about 99% sequence identity. For the purposes of the present invention, sequences having substantially equivalent biological activity and substantially equivalent expression characteristics are considered substantially equivalent. For the purposes of determining equivalence, truncation of the mature sequence (e.g., via a mutation which creates a spurious stop codon) should be disregarded. Sequence identity may be determined, e.g., using the Jotun Hein method (Hein, J. (1990) Methods Enzymol. 183:626-645). Identity between sequences can also be determined by other methods known in the art, e.g. by varying hybridization conditions.

[0062] The term “totipotent” refers to the capability of a cell to differentiate into all of the cell types of an adult organism.

[0063] The term “transformation” means introducing DNA into a suitable host cell so that the DNA is replicable, either as an extrachromosomal element, or by chromosomal integration. The term “transfection” refers to the taking up of an expression vector by a suitable host cell, whether or not any coding sequences are in fact expressed. The term “infection” refers to the introduction of nucleic acids into a suitable host cell by use of a virus or viral vector.

[0064] As used herein, an “uptake modulating fragment,” UMF, means a series of nucleotides which mediate the uptake of a linked DNA fragment into a cell. UMFs can be readily identified using known UMFs as a target sequence or target motif with the computer-based systems described below. The presence and activity of a UMF can be confirmed by attaching the suspected UMF to a marker sequence. The resulting nucleic acid molecule is then incubated with an appropriate host under appropriate conditions and the uptake of the marker sequence is determined. As described above, a UMF will increase the frequency of uptake of a linked marker sequence.

[0065] Each of the above terms is meant to encompass all that is described for each, unless the context dictates otherwise.

[0066] 4.2 Nucleic Acids of the Invention

[0067] Nucleotide sequences of the invention are set forth in the Sequence Listing.

[0068] The isolated polynucleotides of the invention include a polynucleotide comprising the nucleotide sequences of SEQ ID NO: 1-43, or 87-129; a polynucleotide encoding any one of the peptide sequences of SEQ ID NO: 44-86, or 130-172; and a polynucleotide comprising the nucleotide sequence encoding the mature protein coding sequence of the polypeptides of any one of SEQ ID NO: 44-86, or 130-172. The polynucleotides of the present invention also include, but are not limited to, a polynucleotide that hybridizes under stringent conditions to (a) the complement of any of the nucleotides sequences of SEQ ID NO: 1-43, or 87-129; (b) nucleotide sequences encoding any one of the amino acid sequences set forth in the Sequence Listing as SEQ ID NO: 44-86, or 130-172; (c) a polynucleotide which is an allelic variant of any polynucleotide recited above; (d) a polynucleotide which encodes a species homolog of any of the proteins recited above; or (e) a polynucleotide that encodes a polypeptide comprising a specific domain or truncation of the polypeptides of SEQ ID NO: 44-86, or 130-172. Domains of interest may depend on the nature of the encoded polypeptide; e.g., domains in receptor-like polypeptides include ligand-binding, extracellular, transmembrane, or cytoplasmic domains, or combinations thereof; domains in immunoglobulin-like proteins include the variable immunoglobulin-like domains; domains in enzyme-like polypeptides include catalytic and substrate binding domains; and domains in ligand polypeptides include receptor-binding domains.

[0069] The polynucleotides of the invention include naturally occurring or wholly or partially synthetic DNA, e.g., cDNA and genomic DNA, and RNA, e.g., mRNA. The polynucleotides may include all of the coding region of the cDNA or may represent a portion of the coding region of the cDNA.

[0070] The present invention also provides genes corresponding to the cDNA sequences disclosed herein. The corresponding genes can be isolated in accordance with known methods using the sequence information disclosed herein. Such methods include the preparation of probes or primers from the disclosed sequence information for identification and/or amplification of genes in appropriate genomic libraries or other sources of genomic materials. Further 5′ and 3′ sequence can be obtained using methods known in the art. For example, full length cDNA or genomic DNA that corresponds to any of the polynucleotides of SEQ ID NO: 1-43, or 87-129 can be obtained by screening appropriate cDNA or genomic DNA libraries under suitable hybridization conditions using any of the polynucleotides of SEQ ID NO: 1-43, or 87-129 or a portion thereof as a probe. Alternatively, the polynucleotides of SEQ ID NO: 1-43, or 87-129 may be used as the basis for suitable primer(s) that allow identification and/or amplification of genes in appropriate genomic DNA or cDNA libraries.

[0071] The nucleic acid sequences of the invention can be assembled from ESTs and sequences (including cDNA and genomic sequences) obtained from one or more public databases, such as dbEST, gbpri, and UniGene. The EST sequences can provide identifying sequence information, representative fragment or segment information, or novel segment information for the full-length gene.

[0072] The polynucleotides of the invention also provide polynucleotides including nucleotide sequences that are substantially equivalent to the polynucleotides recited above. Polynucleotides according to the invention can have, e.g., at least about 65%, at least about 70%, at least about 75%, at least about 80%, 81%, 82%, 83%, 84%, more typically at least about 85%, 86%, 87%, 88%, 89%, more typically at least about 90%, 91%, 92%, 93%, 94%, and even more typically at least about 95%, 96%, 97%, 98%, 99%, sequence identity to a polynucleotide recited above.

[0073] Included within the scope of the nucleic acid sequences of the invention are nucleic acid sequence fragments that hybridize under stringent conditions to any of the nucleotide sequences of SEQ ID NO: 1-43, or 87-129, or complements thereof, which fragment is greater than about 5 nucleotides, preferably 7 nucleotides, more preferably greater than 9 nucleotides and most preferably greater than 17 nucleotides. Fragments of, e.g. 15, 17, or 20 nucleotides or more that are selective for (i.e. specifically hybridize to) any one of the polynucleotides of the invention are contemplated. Probes capable of specifically hybridizing to a polynucleotide can differentiate polynucleotide sequences of the invention from other polynucleotide sequences in the same family of genes or can differentiate human genes from genes of other species, and are preferably based on unique nucleotide sequences.

[0074] The sequences falling within the scope of the present invention are not limited to these specific sequences, but also include allelic and species variations thereof. Allelic and species variations can be routinely determined by comparing the sequence provided in SEQ ID NO: 1-43, or 87-129, a representative fragment thereof, or a nucleotide sequence at least 90% identical, preferably 95% identical, to SEQ ID NO: 1-43, or 87-129 with a sequence from another isolate of the same species. Furthermore, to accommodate codon variability, the invention includes nucleic acid molecules coding for the same amino acid sequences as do the specific ORFs disclosed herein. In other words, in the coding region of an ORF, substitution of one codon for another codon that encodes the same amino acid is expressly contemplated.

[0075] The nearest neighbor or homology result for the nucleic acids of the present invention, including SEQ ID NO: 1-43, or 87-129, can be obtained by searching a database using an algorithm or a program Preferably, a BLAST which stands for Basic Local Alignment Search Tool is used to search for local sequence alignments (Altshul, S. F. J Mol. Evol. 36 290-300 (1993) and Altschul S. F. et al. J. Mol. Biol. 21:403-410 (1990)). Alternatively a FASTA version 3 search against Genpept, using Fastxy algorithm.

[0076] Species homologs (or orthologs) of the disclosed polynucleotides and proteins are also provided by the present invention. Species homologs may be isolated and identified by making suitable probes or primers from the sequences provided herein and screening a suitable nucleic acid source from the desired species.

[0077] The invention also encompasses allelic variants of the disclosed polynucleotides or proteins; that is, naturally-occurring alternative forms of the isolated polynucleotide which also encode proteins which are identical, homologous or related to that encoded by the polynucleotides.

[0078] The nucleic acid sequences of the invention are further directed to sequences which encode variants of the described nucleic acids. These amino acid sequence variants may be prepared by methods known in the art by introducing appropriate nucleotide changes into a native or variant polynucleotide. There are two variables in the construction of amino acid sequence variants: the location of the mutation and the nature of the mutation. Nucleic acids encoding the amino acid sequence variants are preferably constructed by mutating the polynucleotide to encode an amino acid sequence that does not occur in nature. These nucleic acid alterations can be made at sites that differ in the nucleic acids from different species (variable positions) or in highly conserved regions (constant regions). Sites at such locations will typically be modified in series, e.g., by substituting first with conservative choices (e.g., hydrophobic amino acid to a different hydrophobic amino acid) and then with more distant choices (e.g., hydrophobic amino acid to a charged amino acid), and then deletions or insertions may be made at the target site. Amino acid sequence deletions generally range from about 1 to 30 residues, preferably about 1 to 10 residues, and are typically contiguous. Amino acid insertions include amino- and/or carboxyl-terminal fusions ranging in length from one to one hundred or more residues, as well as intrasequence insertions of single or multiple amino acid residues. Intrasequence insertions may range generally from about 1 to 10 amino residues, preferably from 1 to 5 residues. Examples of terminal insertions include the heterologous signal sequences necessary for secretion or for intracellular targeting in different host cells and sequences such as FLAG or poly-histidine sequences useful for purifying the expressed protein.

[0079] In a preferred method, polynucleotides encoding the novel amino acid sequences are changed via site-directed mutagenesis. This method uses oligonucleotide sequences to alter a polynucleotide to encode the desired amino acid variant, as well as sufficient adjacent nucleotides on both sides of the changed amino acid to form a stable duplex on either side of the site of being changed. In general, the techniques of site-directed mutagenesis are well known to those of skill in the art and this technique is exemplified by publications such as, Edelman et al., DNA 2:183 (1983). A versatile and efficient method for producing site-specific changes in a polynucleotide sequence was published by Zoller and Smith, Nucleic Acids Res. 10:6487-6500 (1982). PCR may also be used to create amino acid sequence variants of the novel nucleic acids. When small amounts of template DNA are used as starting material, primer(s) that differs slightly in sequence from the corresponding region in the template DNA can generate the desired amino acid variant. PCR amplification results in a population of product DNA fragments that differ from the polynucleotide template encoding the polypeptide at the position specified by the primer. The product DNA fragments replace the corresponding region in the plasmid and this gives a polynucleotide encoding the desired amino acid variant.

[0080] A further technique for generating amino acid variants is the cassette mutagenesis technique described in Wells et al., Gene 34:315 (1985); and other mutagenesis techniques well known in the art, such as, for example, the techniques in Sambrook et al., supra, and Current Protocols in Molecular Biology, Ausubel et al. Due to the inherent degeneracy of the genetic code, other DNA sequences which encode substantially the same or a functionally equivalent amino acid sequence may be used in the practice of the invention for the cloning and expression of these novel nucleic acids. Such DNA sequences include those which are capable of hybridizing to the appropriate novel nucleic acid sequence under stringent conditions.

[0081] Polynucleotides encoding preferred polypeptide truncations of the invention can be used to generate polynucleotides encoding chimeric or fusion proteins comprising one or more domains of the invention and heterologous protein sequences.

[0082] The polynucleotides of the invention additionally include the complement of any of the polynucleotides recited above. The polynucleotide can be DNA (genomic, cDNA, amplified, or synthetic) or RNA. Methods and algorithms for obtaining such polynucleotides are well known to those of skill in the art and can include, for example, methods for determining hybridization conditions that can routinely isolate polynucleotides of the desired sequence identities.

[0083] In accordance with the invention, polynucleotide sequences comprising the mature protein coding sequences corresponding to any one of SEQ ID NO: 1-43, or 87-129, or functional equivalents thereof, may be used to generate recombinant DNA molecules that direct the expression of that nucleic acid, or a functional equivalent thereof, in appropriate host cells. Also included are the cDNA inserts of any of the clones identified herein.

[0084] A polynucleotide according to the invention can be joined to any of a variety of other nucleotide sequences by well-established recombinant DNA techniques (see Sambrook J et al. (1989) Molecular Cloning: A Laboratory Manual, Cold Spring Harbor Laboratory, NY). Useful nucleotide sequences for joining to polynucleotides include an assortment of vectors, e.g., plasmids, cosmids, lambda phage derivatives, phagemids, and the like, that are well known in the art. Accordingly, the invention also provides a vector including a polynucleotide of the invention and a host cell containing the polynucleotide. In general, the vector contains an origin of replication functional in at least one organism, convenient restriction endonuclease sites, and a selectable marker for the host cell. Vectors according to the invention include expression vectors, replication vectors, probe generation vectors, and sequencing vectors. A host cell according to the invention can be a prokaryotic or eukaryotic cell and can be a unicellular organism or part of a multicellular organism.

[0085] The present invention further provides recombinant constructs comprising a nucleic acid having any of the nucleotide sequences of SEQ ID NO: 1-43, or 87-129 or a fragment thereof or any other polynucleotides of the invention. In one embodiment, the recombinant constructs of the present invention comprise a vector, such as a plasmid or viral vector, into which a nucleic acid having any of the nucleotide sequences of SEQ ID NO: 1-43, or 87-129 or a fragment thereof is inserted, in a forward or reverse orientation. In the case of a vector comprising one of the ORFs of the present invention, the vector may further comprise regulatory sequences, including for example, a promoter, operably linked to the ORF. Large numbers of suitable vectors and promoters are known to those of skill in the art and are commercially available for generating the recombinant constructs of the present invention. The following vectors are provided by way of example. Bacterial: pBs, phagescript, PsiX174, pBluescript SK, pBs KS, pNH8a, pNH16a, pNH18a, pNH46a (Stratagene); pTrc99A, pKK223-3, pKK233-3, pDR540, pRIT5 (Pharmacia). Eukaryotic: pWLneo, pSV2cat, pOG44, PXTI, pSG (Stratagene) pSVK3, pBPV, pMSG, pSVL (Pharmacia).

[0086] The isolated polynucleotide of the invention may be operably linked to an expression control sequence such as the pMT2 or pED expression vectors disclosed in Kaufman et al., Nucleic Acids Res. 19, 4485-4490 (1991), in order to produce the protein recombinantly. Many suitable expression control sequences are known in the art. General methods of expressing recombinant proteins are also known and are exemplified in R. Kaufman, Methods in Enzymology 185, 537-566 (1990). As defined herein “operably linked” means that the isolated polynucleotide of the invention and an expression control sequence are situated within a vector or cell in such a way that the protein is expressed by a host cell which has been transformed (transfected) with the ligated polynucleotide/expression control sequence.

[0087] Promoter regions can be selected from any desired gene using CAT (chloramphenicol transferase) vectors or other vectors with selectable markers. Two appropriate vectors are pKK232-8 and pCM7. Particular named bacterial promoters include lac, lacZ, T3, T7, gpt, lambda PR, and trc. Eukaryotic promoters include CMV immediate early, HSV thymidine kinase, early and late SV40, LTRs from retrovirus, and mouse metallothionein-I. Selection of the appropriate vector and promoter is well within the level of ordinary skill in the art. Generally, recombinant expression vectors will include origins of replication and selectable markers permitting transformation of the host cell, e.g., the ampicillin resistance gene of E. coli and S. cerevisiae TRP1 gene, and a promoter derived from a highly-expressed gene to direct transcription of a downstream structural sequence. Such promoters can be derived from operons encoding glycolytic enzymes such as 3-phosphoglycerate kinase (PGK), a-factor, acid phosphatase, or heat shock proteins, among others. The heterologous structural sequence is assembled in appropriate phase with translation initiation and termination sequences, and preferably, a leader sequence capable of directing secretion of translated protein into the periplasmic space or extracellular medium. Optionally, the heterologous sequence can encode a fusion protein including an amino terminal identification peptide imparting desired characteristics, e.g., stabilization or simplified purification of expressed recombinant product. Useful expression vectors for bacterial use are constructed by inserting a structural DNA sequence encoding a desired protein together with suitable translation initiation and termination signals in operable reading phase with a functional promoter. The vector will comprise one or more phenotypic selectable markers and an origin of replication to ensure maintenance of the vector and to, if desirable, provide amplification within the host. Suitable prokaryotic hosts for transformation include E. coli, Bacillus subtilis, Salmonella typhimurium and various species within the genera Pseudomonas, Streptomyces, and Staphylococcus, although others may also be employed as a matter of choice.

[0088] As a representative but non-limiting example, useful expression vectors for bacterial use can comprise a selectable marker and bacterial origin of replication derived from commercially available plasmids comprising genetic elements of the well known cloning vector pBR322 (ATCC 37017). Such commercial vectors include, for example, pKK223-3 (Pharmacia Fine Chemicals, Uppsala, Sweden) and GEM 1 (Promega Biotech, Madison, Wis., USA). These pBR322 “backbone” sections are combined with an appropriate promoter and the structural sequence to be expressed. Following transformation of a suitable host strain and growth of the host strain to an appropriate cell density, the selected promoter is induced or derepressed by appropriate means (e.g., temperature shift or chemical induction) and cells are cultured for an additional period. Cells are typically harvested by centrifugation, disrupted by physical or chemical means, and the resulting crude extract retained for further purification.

[0089] Polynucleotides of the invention can also be used to induce immune responses. For example, as described in Fan et al., Nat. Biotech. 17:870-872 (1999), incorporated herein by reference, nucleic acid sequences encoding a polypeptide may be used to generate antibodies against the encoded polypeptide following topical administration of naked plasmid DNA or following injection, and preferably intramuscular injection of the DNA. The nucleic acid sequences are preferably inserted in a recombinant expression vector and may be in the form of naked DNA.

[0090] 4.3 Antisense Nucleic Acids

[0091] Another aspect of the invention pertains to isolated antisense nucleic acid molecules that are hybridizable to or complementary to the nucleic acid molecule comprising the nucleotide sequence of SEQ ID NO: 1-43, or 87-129, or fragments, analogs or derivatives thereof. An “antisense” nucleic acid comprises a nucleotide sequence that is complementary to a “sense” nucleic acid encoding a protein, e.g., complementary to the coding strand of a double-stranded cDNA molecule or complementary to an mRNA sequence. In specific aspects, antisense nucleic acid molecules are provided that comprise a sequence complementary to at least about 10, 25, 50, 100, 250 or 500 nucleotides or an entire coding strand, or to only a portion thereof. Nucleic acid molecules encoding fragments, homologs, derivatives and analogs of a protein of any of

[0092] SEQ ID NO: 44-86, or 130-172 or antisense nucleic acids complementary to a nucleic acid sequence of SEQ ID NO: 1-43, or 87-129 are additionally provided.

[0093] In one embodiment, an antisense nucleic acid molecule is antisense to a “coding region” of the coding strand of a nucleotide sequence of the invention. The term “coding region” refers to the region of the nucleotide sequence comprising codons which are translated into amino acid residues. In another embodiment, the antisense nucleic acid molecule is antisense to a “noncoding region” of the coding strand of a nucleotide sequence of the invention. The term “noncoding region” refers to 5′ and 3′ sequences which flank the coding region that are not translated into amino acids (i.e., also referred to as 5′ and 3′ untranslated regions). Given the coding strand sequences encoding a nucleic acid disclosed herein (e.g., SEQ ID NO: 1-43, or 87-129), antisense nucleic acids of the invention can be designed according to the rules of Watson and Crick or Hoogsteen base pairing. The antisense nucleic acid molecule can be complementary to the entire coding region of an mRNA, but more preferably is an oligonucleotide that is antisense to only a portion of the coding or noncoding region of a mRNA. For example, the antisense oligonucleotide can be complementary to the region surrounding the translation start site of a mRNA. An antisense oligonucleotide can be, for example, about 5, 10, 15, 20, 25, 30, 35, 40, 45 or 50 nucleotides in length. An antisense nucleic acid of the invention can be constructed using chemical synthesis or enzymatic ligation reactions using procedures known in the art. For example, an antisense nucleic acid (e.g., an antisense oligonucleotide) can be chemically synthesized using naturally occurring nucleotides or variously modified nucleotides designed to increase the biological stability of the molecules or to increase the physical stability of the duplex formed between the antisense and sense nucleic acids, e.g., phosphorothioate derivatives and acridine substituted nucleotides can be used.

[0094] Examples of modified nucleotides that can be used to generate the antisense nucleic acid include: 5-fluorouracil, 5-bromouracil, 5-chlorouracil, 5-iodouracil, hypoxanthine, xanthine, 4-acetylcytosine, 5-(carboxyhydroxylmethyl) uracil, 5-carboxymethylaminomethyl-2-thiouridine, 5-carboxymethylaminomethyluracil, dihydrouracil, beta-D-galactosylqueosine, inosine, N6-isopentenyladenine, 1-methylguanine, 1-methylinosine, 2,2-dimethylguanine, 2-methyladenine, 2-methylguanine, 3-methylcytosine, 5-methylcytosine, N6-adenine, 7-methylguanine, 5-methylaminomethyluracil, 5-methoxyaminomethyl-2-thiouracil, beta-D-mannosylqueosine, 5′-methoxycarboxymethyluracil, 5-methoxyuracil, 2-methylthio-N-6-isopentenyladenine, uracil-5-oxyacetic acid (v), wybutoxosine, pseudouracil, queosine, 2-thiocytosine, 5-methyl-2-thiouracil, 2-thiouracil, 4-thiouracil, 5-methyluracil, uracil-5-oxyacetic acid methylester, uracil-5-oxyacetic acid (v), 5-methyl-2-thiouracil, 3-(3-amino-3-N-2-carboxypropyl) uracil, (acp3)w, and 2,6-diaminopurine. Alternatively, the antisense nucleic acid can be produced biologically using an expression vector into which a nucleic acid has been subcloned in an antisense orientation (i.e., RNA transcribed from the inserted nucleic acid will be of an antisense orientation to a target nucleic acid of interest, described further in the following subsection).

[0095] The antisense nucleic acid molecules of the invention are typically administered to a subject or generated in situ such that they hybridize with or bind to cellular mRNA and/or genomic DNA encoding a protein according to the invention to thereby inhibit expression of the protein, e.g., by inhibiting transcription and/or translation. The hybridization can be by conventional nucleotide complementarity to form a stable duplex, or, for example, in the case of an antisense nucleic acid molecule that binds to DNA duplexes, through specific interactions in the major groove of the double helix. An example of a route of administration of antisense nucleic acid molecules of the invention includes direct injection at a tissue site. Alternatively, antisense nucleic acid molecules can be modified to target selected cells and then administered systemically. For example, for systemic administration, antisense molecules can be modified such that they specifically bind to receptors or antigens expressed on a selected cell surface, e.g., by linking the antisense nucleic acid molecules to peptides or antibodies that bind to cell surface receptors or antigens. The antisense nucleic acid molecules can also be delivered to cells using the vectors described herein. To achieve sufficient intracellular concentrations of antisense molecules, vector constructs in which the antisense nucleic acid molecule is placed under the control of a strong pol II or pol III promoter are preferred.

[0096] In yet another embodiment, the antisense nucleic acid molecule of the invention is an α-anomeric nucleic acid molecule. An α-anomeric nucleic acid molecule forms specific double-stranded hybrids with complementary RNA in which, contrary to the usual β-units, the strands run parallel to each other (Gaultier et al. (1987) Nucleic Acids Res 15: 6625-6641). The antisense nucleic acid molecule can also comprise a 2′-o-methylribonucleotide (Inoue et al. (1987) Nucleic Acids Res 15: 6131-6148) or a chimeric RNA-DNA analogue (Inoue et al. (1987) FEBS Lett 215: 327-330).

[0097] 4.4 Ribozymes and PNA Moieties

[0098] In still another embodiment, an antisense nucleic acid of the invention is a ribozyme. Ribozymes are catalytic RNA molecules with ribonuclease activity that are capable of cleaving a single-stranded nucleic acid, such as an mRNA, to which they have a complementary region. Thus, ribozymes (e.g., hammerhead ribozymes (described in Haselhoff and Gerlach (1988) Nature 334:585-591)) can be used to catalytically cleave a mRNA transcripts to thereby inhibit translation of a mRNA. A ribozyme having specificity for a nucleic acid of the invention can be designed based upon the nucleotide sequence of a DNA disclosed herein (i.e., SEQ ID NO: 1-43, or 87-129). For example, a derivative of a Tetrahymena L-19 IVS RNA can be constructed in which the nucleotide sequence of the active site is complementary to the nucleotide sequence to be cleaved in an “mRNA of SEQ ID NO: 1-43, or 87-129 (see, e.g. Cech et al. U.S. Pat. No. 4,987,071; and Cech et al. U.S. Pat. No. 5,116,742). Alternatively, polynucleotides of the invention can be used to select a catalytic RNA having a specific ribonuclease activity from a pool of RNA molecules. See, e.g., Bartel et al., (1993) Science 261:1411-1418.

[0099] Alternatively, gene expression can be inhibited by targeting nucleotide sequences complementary to the regulatory region (e.g., promoter and/or enhancers) to form triple helical structures that prevent transcription of the gene in target cells. See generally, Helene. (1991) Anticancer Drug Des. 6: 569-84; Helene. et al. (1992) Ann. N.Y. Acad. Sci. 660:27-36; and Maher (1992) Bioassays 14: 807-15.

[0100] In various embodiments, the nucleic acids of the invention can be modified at the base moiety, sugar moiety or phosphate backbone to improve, e.g., the stability, hybridization, or solubility of the molecule. For example, the deoxyribose phosphate backbone of the nucleic acids can be modified to generate peptide nucleic acids (see Hyrup et al. (1996) Bioorg Med Chem 4: 5-23). As used herein, the terms “peptide nucleic acids” or “PNAs” refer to nucleic acid mimics, e.g., DNA mimics, in which the deoxyribose phosphate backbone is replaced by a pseudopeptide backbone and only the four natural nucleobases are retained. The neutral backbone of PNAs has been shown to allow for specific hybridization to DNA and RNA under conditions of low ionic strength. The synthesis of PNA oligomers can be performed using standard solid phase peptide synthesis protocols as described in Hyrup et al. (1996) above; Perry-O'Keefe et al. (1996) PNAS 93: 14670-675.

[0101] PNAs of the invention can be used in therapeutic and diagnostic applications. For example, PNAs can be used as antisense or antigene agents for sequence-specific modulation of gene expression by, e.g., inducing transcription or translation arrest or inhibiting replication. PNAs of the invention can also be used, e.g., in the analysis of single base pair mutations in a gene by, e.g., PNA directed PCR clamping; as artificial restriction enzymes when used in combination with other enzymes, e.g., S1 nucleases (Hyrup B. (1996) above); or as probes or primers for DNA sequence and hybridization (Hyrup et al. (1996), above; Perry-O'Keefe (1996), above).

[0102] In another embodiment, PNAs of the invention can be modified, e.g., to enhance their stability or cellular uptake, by attaching lipophilic or other helper groups to PNA, by the formation of PNA-DNA chimeras, or by the use of liposomes or other techniques of drug delivery known in the art. For example, PNA-DNA chimeras can be generated that may combine the advantageous properties of PNA and DNA. Such chimeras allow DNA recognition enzymes, e.g., RNase H and DNA polymerases, to interact with the DNA portion while the PNA portion would provide high binding affinity and specificity. PNA-DNA chimeras can be linked using linkers of appropriate lengths selected in terms of base stacking, number of bonds between the nucleobases, and orientation (Hyrup (1996) above). The synthesis of PNA-DNA chimeras can be performed as described in Hyrup (1996) above and Finn et al. (1996) Nucl Acids Res 24: 3357-63. For example, a DNA chain can be synthesized on a solid support using standard phosphoramidite coupling chemistry, and modified nucleoside analogs, e.g., 5′-(4-methoxytrityl)amino-5′-deoxy-thymidine phosphoramidite, can be used between the PNA and the 5′ end of DNA (Mag et al. (1989) Nucl Acid Res 17: 5973-88). PNA monomers are then coupled in a stepwise manner to produce a chimeric molecule with a 5′ PNA segment and a 3′ DNA segment (Finn et al. (1996) above). Alternatively, chimeric molecules can be synthesized with a 5′ DNA segment and a 3′ PNA segment. See, Petersen et al. (1975) Bioorg Med Chem Lett 5: 1119-11124.

[0103] In other embodiments, the oligonucleotide may include other appended groups such as peptides (e.g., for targeting host cell receptors in vivo), or agents facilitating transport across the cell membrane (see, e.g., Letsinger et al., 1989, Proc. Natl. Acad. Sci. U.S. 86:6553-6556; Lemaitre et al., 1987, Proc. Natl. Acad. Sci. 84:648-652; PCT Publication No. WO88/09810) or the blood-brain barrier (see, e.g., PCT Publication No. WO89/10134). In addition, oligonucleotides can be modified with hybridization triggered cleavage agents (See, e.g. Krol et al., 1988, BioTechniques 6:958-976) or intercalating agents. (See, e.g., Zon, 1988, Pharm. Res. 5: 539-549). To this end, the oligonucleotide may be conjugated to another molecule, e.g., a peptide, a hybridization triggered cross-linking agent, a transport agent, a hybridization-triggered cleavage agent, etc.

[0104] 4.5 Hosts

[0105] The present invention further provides host cells genetically engineered to contain the polynucleotides of the invention. For example, such host cells may contain nucleic acids of the invention introduced into the host cell using known transformation, transfection or infection methods. The present invention still further provides host cells genetically engineered to express the polynucleotides of the invention, wherein such polynucleotides are in operative association with a regulatory sequence heterologous to the host cell which drives expression of the polynucleotides in the cell.

[0106] Knowledge of nucleic acid sequences allows for modification of cells to permit, or increase, expression of endogenous polypeptide. Cells can be modified (e.g., by homologous recombination) to provide increased polypeptide expression by replacing, in whole or in part, the naturally occurring promoter with all or part of a heterologous promoter so that the cells express the polypeptide at higher levels. The heterologous promoter is inserted in such a manner that it is operatively linked to the encoding sequences. See, for example, PCT International Publication No. WO94/12650, PCT International Publication No. WO92/20808, and PCT International Publication No. WO91/09955. It is also contemplated that, in addition to heterologous promoter DNA, amplifiable marker DNA (e.g., ada, dhfr, and the multifunctional CAD gene which encodes carbamyl phosphate synthase, aspartate transcarbamylase, and dihydroorotase) and/or intron DNA may be inserted along with the heterologous promoter DNA. If linked to the coding sequence, amplification of the marker DNA by standard selection methods results in co-amplification of the desired protein coding sequences in the cells.

[0107] The host cell can be a higher eukaryotic host cell, such as a mammalian cell, a lower eukaryotic host cell, such as a yeast cell, or the host cell can be a prokaryotic cell, such as a bacterial cell. Introduction of the recombinant construct into the host cell can be effected by calcium phosphate transfection, DEAE-dextran mediated transfection, or electroporation (Davis, L. et al., Basic Methods in Molecular Biology (1986)). The host cells containing one of the polynucleotides of the invention, can be used in conventional manners to produce the gene product encoded by the isolated fragment (in the case of an ORF) or can be used to produce a heterologous protein under the control of the EMF.

[0108] Any host/vector system can be used to express one or more of the ORFs of the present invention These include, but are not limited to, eukaryotic hosts such as HeLa cells, Cv-1 cell, COS cells, 293 cells, and Sf9 cells, as well as prokaryotic host such as E. coli and B. subtilis. The most preferred cells are those which do not normally express the particular polypeptide or protein or which expresses the polypeptide or protein at low natural level. Mature proteins can be expressed in mammalian cells, yeast, bacteria, or other cells under the control of appropriate promoters. Cell-free translation systems can also be employed to produce such proteins using RNAs derived from the DNA constructs of the present invention. Appropriate cloning and expression vectors for use with prokaryotic and eukaryotic hosts are described by Sambrook, et al., in Molecular Cloning: A Laboratory Manual, Second Edition, Cold Spring Harbor, N.Y. (1989), the disclosure of which is hereby incorporated by reference.

[0109] Various mammalian cell culture systems can also be employed to express recombinant protein. Examples of mammalian expression systems include the COS-7 lines of monkey kidney fibroblasts, described by Gluzman, Cell 23:175 (1981). Other cell lines capable of expressing a compatible vector are, for example, the C127, monkey COS cells, Chinese Hamster Ovary (CHO) cells, human kidney 293 cells, human epidermal A431 cells, human Colo205 cells, 3T3 cells, CV-1 cells, other transformed primate cell lines, normal diploid cells, cell strains derived from in vitro culture of primary tissue, primary explants, HeLa cells, mouse L cells, BHK, HL-60, U937, HaK or Jurkat cells. Mammalian expression vectors will comprise an origin of replication, a suitable promoter and also any necessary ribosome binding sites, polyadenylation S site, splice donor and acceptor sites, transcriptional termination sequences, and 5′ flanking nontranscribed sequences. DNA sequences derived from the SV40 viral genome, for example, SV40 origin, early promoter, enhancer, splice, and polyadenylation sites may be used to provide the required nontranscribed genetic elements. Recombinant polypeptides and proteins produced in bacterial culture are usually isolated by initial extraction from cell pellets, followed by one or more salting-out, aqueous ion exchange or size exclusion chromatography steps. Protein refolding steps can be used, as necessary, in completing configuration of the mature protein. Finally, high performance liquid chromatography (HPLC) can be employed for final purification steps. Microbial cells employed in expression of proteins can be disrupted by any convenient method, including freeze-thaw cycling, sonication, mechanical disruption, or use of cell lysing agents.

[0110] Alternatively, it may be possible to produce the protein in lower eukaryotes such as yeast or insects or in prokaryotes such as bacteria. Potentially suitable yeast strains include Saccharomyces cerevisiae, Schizosaccharomyces pombe, Kluyveromyces strains, Candida, or any yeast strain capable of expressing heterologous proteins. Potentially suitable bacterial strains include Escherichia coli, Bacillus subtilis, Salmonella typhimurium, or any bacterial strain capable of expressing heterologous proteins. If the protein is made in yeast or bacteria, it may be necessary to modify the protein produced therein, for example by phosphorylation or glycosylation of the appropriate sites, in order to obtain the functional protein. Such covalent attachments may be accomplished using known chemical or enzymatic methods.

[0111] In another embodiment of the present invention, cells and tissues may be engineered to express an endogenous gene comprising the polynucleotides of the invention under the control of inducible regulatory elements, in which case the regulatory sequences of the endogenous gene may be replaced by homologous recombination. As described herein, gene targeting can be used to replace a gene's existing regulatory region with a regulatory sequence isolated from a different gene or a novel regulatory sequence synthesized by genetic engineering methods. Such regulatory sequences may be comprised of promoters, enhancers, scaffold-attachment regions, negative regulatory elements, transcriptional initiation sites, regulatory protein binding sites or combinations of said sequences. Alternatively, sequences which affect the structure or stability of the RNA or protein produced may be replaced, removed, added, or otherwise modified by targeting. These sequence include polyadenylation signals, mRNA stability elements, splice sites, leader sequences for enhancing or modifying transport or secretion properties of the protein, or other sequences which alter or improve the function or stability of protein or RNA molecules.

[0112] The targeting event may be a simple insertion of the regulatory sequence, placing the gene under the control of the new regulatory sequence, e.g., inserting a new promoter or enhancer or both upstream of a gene. Alternatively, the targeting event may be a simple deletion of a regulatory element, such as the deletion of a tissue-specific negative regulatory element. Alternatively, the targeting event may replace an existing element; for example, a tissue-specific enhancer can be replaced by an enhancer that has broader or different cell-type specificity than the naturally occurring elements. Here, the naturally occurring sequences are deleted and new sequences are added. In all cases, the identification of the targeting event may be facilitated by the use of one or more selectable marker genes that are contiguous with the targeting DNA, allowing for the selection of cells in which the exogenous DNA has integrated into the host cell genome. The identification of the targeting event may also be facilitated by the use of one or more marker genes exhibiting the property of negative selection, such that the negatively selectable marker is linked to the exogenous DNA, but configured such that the negatively selectable marker flanks the targeting sequence, and such that a correct homologous recombination event with sequences in the host cell genome does not result in the stable integration of the negatively selectable marker. Markers useful for this purpose include the Herpes Simplex Virus thymidine kinase (TK) gene or the bacterial xanthine-guanine phosphoribosyl-transferase (gpt) gene.

[0113] The gene targeting or gene activation techniques which can be used in accordance with this aspect of the invention are more particularly described in U.S. Pat. No. 5,272,071 to Chappel; U.S. Pat. No. 5,578,461 to Sherwin et al.; International Application No. PCT/US92/09627 (WO93/09222) by Selden et al.; and International Application No. PCT/US90/06436 (WO91/06667) by Skoultchi et al., each of which is incorporated by reference herein in its entirety.

[0114] 4.6 Polypeptides of the Invention

[0115] The isolated polypeptides of the invention include, but are not limited to, a polypeptide comprising: the amino acid sequences set forth as any one of SEQ ID NO: 44-86, or 130-172 or an amino acid sequence encoded by any one of the nucleotide sequences SEQ ID NO: 1-43, or 87-129 or the corresponding full length or mature protein. Polypeptides of the invention also include polypeptides preferably with biological or immunological activity that are encoded by: (a) a polynucleotide having any one of the nucleotide sequences set forth in SEQ ID NO: 1-43, or 87-129 or (b) polynucleotides encoding any one of the amino acid sequences set forth as SEQ ID NO: 44-86, or 130-172 or (c) polynucleotides that hybridize to the complement of the polynucleotides of either (a) or (b) under stringent hybridization conditions. The invention also provides biologically active or immunologically active variants of any of the amino acid sequences set forth as SEQ ID NO: 44-86, or 130-172 or the corresponding full length or mature protein; and “substantial equivalents” thereof (e.g., with at least about 65%, at least about 70%, at least about 75%, at least about 80%, at least about 85%, 86%, 87%, 88%, 89%, at least about 90%, 91%, 92%, 93%, 94%, typically at least about 95%, 96%, 97%, more typically at least about 98%, or most typically at least about 99% amino acid identity) that retain biological activity. Polypeptides encoded by allelic variants may have a similar, increased, or decreased activity compared to polypeptides comprising SEQ ID NO: 44-86, or 130-172.

[0116] Fragments of the proteins of the present invention which are capable of exhibiting biological activity are also encompassed by the present invention. Fragments of the protein may be in linear form or they may be cyclized using known methods, for example, as described in H. U. Saragovi, et al., Bio/Technology 10, 773-778 (1992) and in R. S. McDowell, et al., J. Amer. Chem. Soc. 114, 9245-9253 (1992), both of which are incorporated herein by reference. Such fragments may be fused to carrier molecules such as immunoglobulins for many purposes, including increasing the valency of protein binding sites.

[0117] The present invention also provides both full-length and mature forms (for example, without a signal sequence or precursor sequence) of the disclosed proteins. The protein coding sequence is identified in the sequence listing by translation of the disclosed nucleotide sequences. The mature form of such protein may be obtained by expression of a full-length polynucleotide in a suitable mammalian cell or other host cell. The sequence of the mature form of the protein is also determinable from the amino acid sequence of the full-length form. Where proteins of the present invention are membrane bound, soluble forms of the proteins are also provided. In such forms, part or all of the regions causing the proteins to be membrane bound are deleted so that the proteins are fully secreted from the cell in which they are expressed.

[0118] Protein compositions of the present invention may further comprise an acceptable carrier, such as a hydrophilic, e.g., pharmaceutically acceptable, carrier.

[0119] The present invention further provides isolated polypeptides encoded by the nucleic acid fragments of the present invention or by degenerate variants of the nucleic acid fragments of the present invention. By “degenerate variant” is intended nucleotide fragments which differ from a nucleic acid fragment of the present invention (e.g., an ORF) by nucleotide sequence but, due to the degeneracy of the genetic code, encode an identical polypeptide sequence. Preferred nucleic acid fragments of the present invention are the ORFs that encode proteins.

[0120] A variety of methodologies known in the art can be utilized to obtain any one of the isolated polypeptides or proteins of the present invention. At the simplest level, the amino acid sequence can be synthesized using commercially available peptide synthesizers. The synthetically-constructed protein sequences, by virtue of sharing primary, secondary or tertiary structural and/or conformational characteristics with proteins may possess biological properties in common therewith, including protein activity. This technique is particularly useful in producing small peptides and fragments of larger polypeptides. Fragments are useful, for example, in generating antibodies against the native polypeptide. Thus, they may be employed as biologically active or immunological substitutes for natural, purified proteins in screening of therapeutic compounds and in immunological processes for the development of antibodies.

[0121] The polypeptides and proteins of the present invention can alternatively be purified from cells which have been altered to express the desired polypeptide or protein. As used herein, a cell is said to be altered to express a desired polypeptide or protein when the cell, through genetic manipulation, is made to produce a polypeptide or protein which it normally does not produce or which the cell normally produces at a lower level. One skilled in the art can readily adapt procedures for introducing and expressing either recombinant or synthetic sequences into eukaryotic or prokaryotic cells in order to generate a cell which produces one of the polypeptides or proteins of the present invention.

[0122] The invention also relates to methods for producing a polypeptide comprising growing a culture of host cells of the invention in a suitable culture medium, and purifying the protein from the cells or the culture in which the cells are grown. For example, the methods of the invention include a process for producing a polypeptide in which a host cell containing a suitable expression vector that includes a polynucleotide of the invention is cultured under conditions that allow expression of the encoded polypeptide. The polypeptide can be recovered from the culture, conveniently from the culture medium, or from a lysate prepared from the host cells and further purified. Preferred embodiments include those in which the protein produced by such process is a full length or mature form of the protein.

[0123] In an alternative method, the polypeptide or protein is purified from bacterial cells which naturally produce the polypeptide or protein. One skilled in the art can readily follow known methods for isolating polypeptides and proteins in order to obtain one of the isolated polypeptides or proteins of the present invention. These include, but are not limited to, immunochromatography, HPLC, size-exclusion chromatography, ion-exchange chromatography, and immuno-affinity chromatography. See, e.g., Scopes, Protein Purification: Principles and Practice, Springer-Verlag (1994); Sambrook, et al., in Molecular Cloning: A Laboratory Manual; Ausubel et al., Current Protocols in Molecular Biology. Polypeptide fragments that retain biological/immunological activity include fragments comprising greater than about 100 amino acids, or greater than about 200 amino acids, and fragments that encode specific protein domains.

[0124] The purified polypeptides can be used in in vitro binding assays which are well known in the art to identify molecules which bind to the polypeptides. These molecules include but are not limited to, for e.g., small molecules, molecules from combinatorial libraries, antibodies or other proteins. The molecules identified in the binding assay are then tested for antagonist or agonist activity in in vivo tissue culture or animal models that are well known in the art. In brief, the molecules are titrated into a plurality of cell cultures or animals and then tested for either cell/animal death or prolonged survival of the animal/cells.

[0125] In addition, the peptides of the invention or molecules capable of binding to the peptides may be complexed with toxins, e.g., ricin or cholera, or with other compounds that are toxic to cells. The toxin-binding molecule complex is then targeted to a tumor or other cell by the specificity of the binding molecule for SEQ ID NO: 44-86, or 130-172.

[0126] The protein of the invention may also be expressed as a product of transgenic animals, e.g., as a component of the milk of transgenic cows, goats, pigs, or sheep which are characterized by somatic or germ cells containing a nucleotide sequence encoding the protein.

[0127] The proteins provided herein also include proteins characterized by amino acid sequences similar to those of purified proteins but into which modification are naturally provided or deliberately engineered. For example, modifications, in the peptide or DNA sequence, can be made by those skilled in the art using known techniques. Modifications of interest in the protein sequences may include the alteration, substitution, replacement, insertion or deletion of a selected amino acid residue in the coding sequence. For example, one or more of the cysteine residues may be deleted or replaced with another amino acid to alter the conformation of the molecule. Techniques for such alteration, substitution, replacement, insertion or deletion are well known to those skilled in the art (see, e.g., U.S. Pat. No. 4,518,584). Preferably, such alteration, substitution, replacement, insertion or deletion retains the desired activity of the protein. Regions of the protein that are important for the protein function can be determined by various methods known in the art including the alanine-scanning method which involved systematic substitution of single or strings of amino acids with alanine, followed by testing the resulting alanine-containing variant for biological activity. This type of analysis determines the importance of the substituted amino acid(s) in biological activity. Regions of the protein that are important for protein function may be determined by the eMATRIX program.

[0128] Other fragments and derivatives of the sequences of proteins which would be expected to retain protein activity in whole or in part and are useful for screening or other immunological methodologies may also be easily made by those skilled in the art given the disclosures herein. Such modifications are encompassed by the present invention.

[0129] The protein may also be produced by operably linking the isolated polynucleotide of the invention to suitable control sequences in one or more insect expression vectors, and employing an insect expression system. Materials and methods for baculovirus/insect cell expression systems are commercially available in kit form from, e.g., Invitrogen, San Diego, Calif., U.S.A. (the MaxBat™ kit), and such methods are well known in the art, as described in Summers and Smith, Texas Agricultural Experiment Station Bulletin No. 1555 (1987), incorporated herein by reference. As used herein, an insect cell capable of expressing a polynucleotide of the present invention is “transformed.”

[0130] The protein of the invention may be prepared by culturing transformed host cells under culture conditions suitable to express the recombinant protein. The resulting expressed protein may then be purified from such culture (i.e., from culture medium or cell extracts) using known purification processes, such as gel filtration and ion exchange chromatography. The purification of the protein may also include an affinity column containing agents which will bind to the protein; one or more column steps over such affinity resins as concanavalin A-agarose, heparin-toyopearl™ or Cibacrom blue 3GA Sepharose™; one or more steps involving hydrophobic interaction chromatography using such resins as phenyl ether, butyl ether, or propyl ether; or immunoaffinity chromatography.

[0131] Alternatively, the protein of the invention may also be expressed in a form which will facilitate purification. For example, it may be expressed as a fusion protein, such as those of maltose binding protein (MBP), glutathione-S-transferase (GST) or thioredoxin (TRX), or as a His tag. Kits for expression and purification of such fusion proteins are commercially available from New England BioLab (Beverly, Mass.), Pharmacia (Piscataway, N.J.) and Invitrogen, respectively. The protein can also be tagged with an epitope and subsequently purified by using a specific antibody directed to such epitope. One such epitope (“FLAG®”) is commercially available from Kodak (New Haven, Conn.).

[0132] Finally, one or more reverse-phase high performance liquid chromatography (RP-HPLC) steps employing hydrophobic RP-HPLC media, e.g., silica gel having pendant methyl or other aliphatic groups, can be employed to further purify the protein. Some or all of the foregoing purification steps, in various combinations, can also be employed to provide a substantially homogeneous isolated recombinant protein. The protein thus purified is substantially free of other mammalian proteins and is defined in accordance with the present invention as an “isolated protein.”

[0133] The polypeptides of the invention include analogs (variants). This embraces fragments, as well as peptides in which one or more amino acids has been deleted, inserted, or substituted. Also, analogs of the polypeptides of the invention embrace fusions of the polypeptides or modifications of the polypeptides of the invention, wherein the polypeptide or analog is fused to another moiety or moieties, e.g., targeting moiety or another therapeutic agent. Such analogs may exhibit improved properties such as activity and/or stability. Examples of moieties which may be fused to the polypeptide or an analog include, for example, targeting moieties which provide for the delivery of polypeptide to pancreatic cells, e.g., antibodies to pancreatic cells, antibodies to immune cells such as T-cells, monocytes, dendritic cells, granulocytes, etc., as well as receptor and ligands expressed on pancreatic or immune cells. Other moieties which may be fused to the polypeptide include therapeutic agents which are used for treatment, for example, immunosuppressive drugs such as cyclosporin, SK506, azathioprine, CD3 antibodies and steroids. Also, polypeptides may be fused to immune modulators, and other cytokines such as alpha or beta interferon.

[0134] 4.6.1 Determining Polypeptide and Polynucleotide Identity and Similarity

[0135] Preferred identity and/or similarity are designed to give the largest match between the sequences tested. Methods to determine identity and similarity are codified in computer programs including, but are not limited to, the GCG program package, including GAP (Devereux, J., et al., Nucleic Acids Research 12(1):387 (1984); Genetics Computer Group, University of Wisconsin, Madison, Wis.), BLASTP, BLASTN, BLASTX, FASTA (Altschul, S. F. et al., J. Molec. Biol. 215:403410 (1990), PSI-BLAST (Altschul S. F. et al., Nucleic Acids Res. vol. 25, pp. 3389-3402, herein incorporated by reference), eMatrix software (Wu et al., J. Comp. Biol., Vol 6, pp. 219-235 (1999), herein incorporated by reference), eMotif software (Nevill-Manning et al, ISMB-97, Vol. 4, pp. 202-209, herein incorporated by reference), pFam software (Sonnhammer et al., Nucleic Acids Res., Vol. 26(1), pp. 320-322 (1998), herein incorporated by reference) and the Kyte-Doolittle hydrophobocity prediction algorithm (J. Mol Biol, 157, pp. 105-31 (1982), incorporated herein by reference). The BLAST programs are publicly available from the National Center for Biotechnology Information (NCBI) and other sources (BLAST Manual, Altschul, S., et al. NCB NLM NIH Bethesda, Md. 20894; Altschul, S., et al., J. Mol. Biol. 215:403-410 (1990).

[0136] 4.7 Chimeric and Fusion Proteins

[0137] The invention also provides chimeric or fusion proteins. As used herein, a “chimeric protein” or “fusion protein” comprises a polypeptide of the invention operatively linked to another polypeptide. Within a fusion protein the polypeptide according to the invention can correspond to all or a portion of a protein according to the invention. In one embodiment, a fusion protein comprises at least one biologically active portion of a protein according to the invention. In another embodiment, a fusion protein comprises at least two biologically active portions of a protein according to the invention. Within the fusion protein, the term “operatively linked” is intended to indicate that the polypeptide according to the invention and the other polypeptide are fused in-frame to each other. The polypeptide can be fused to the N-terminus or C-terminus.

[0138] For example, in one embodiment a fusion protein comprises a polypeptide according to the invention operably linked to the extracellular domain of a second protein. In another embodiment, the fusion protein is a GST-fusion protein in which the polypeptide sequences of the invention are fused to the C-terminus of the GST (i.e., glutathione S-transferase) sequences.

[0139] In another embodiment, the fusion protein is an immunoglobulin fusion protein in which the polypeptide sequences according to the invention comprise one or more domains fused to sequences derived from a member of the immunoglobulin protein family. The immunoglobulin fusion proteins of the invention can be incorporated into pharmaceutical compositions and administered to a subject to inhibit an interaction between a ligand and a protein of the invention on the surface of a cell, to thereby suppress signal transduction in vivo. The immunoglobulin fusion proteins can be used to affect the bioavailability of a cognate ligand. Inhibition of the ligand/protein interaction may be useful therapeutically for both the treatment of proliferative and differentiative disorders, e,g., cancer as well as modulating (e.g., promoting or inhibiting) cell survival. Moreover, the immunoglobulin fusion proteins of the invention can be used as immunogens to produce antibodies in a subject, to purify ligands, and in screening assays to identify molecules that inhibit the interaction of a polypeptide of the invention with a ligand.

[0140] A chimeric or fusion protein of the invention can be produced by standard recombinant DNA techniques. For example, DNA fragments coding for the different polypeptide sequences are ligated together in-frame in accordance with conventional techniques, e.g., by employing blunt-ended or stagger-ended termini for ligation, restriction enzyme digestion to provide for appropriate termini, filling-in of cohesive ends as appropriate, alkaline phosphatase treatment to avoid undesirable joining, and enzymatic ligation. In another embodiment, the fusion gene can be synthesized by conventional techniques including automated DNA synthesizers. Alternatively, PCR amplification of gene fragments can be carried out using anchor primers that give rise to complementary overhangs between two consecutive gene fragments that can subsequently be annealed and reamplified to generate a chimeric gene sequence (see, for example, Ausubel et al. (eds.) CURRENT PROTOCOLS IN MOLECULAR BIOLOGY, John Wiley & Sons, 1992). Moreover, many expression vectors are commercially available that already encode a fusion moiety (e.g., a GST polypeptide). A nucleic acid encoding a polypeptide of the invention can be cloned into such an expression vector such that the fusion moiety is linked in-frame to the protein of the invention.

[0141] 4.8 Gene Therapy

[0142] Mutations in the polynucleotides of the invention may result in loss of normal function of the encoded protein. The invention thus provides gene therapy to restore normal activity of the polypeptides of the invention; or to treat disease states involving polypeptides of the invention. Delivery of a functional gene encoding polypeptides of the invention to appropriate cells is effected ex vivo, in situ, or in vivo by use of vectors, and more particularly viral vectors (e.g., adenovirus, adeno-associated virus, or a retrovirus), or ex vivo by use of physical DNA transfer methods (e.g., liposomes or chemical treatments). See, for example, Anderson, Nature, supplement to vol. 392, no. 6679, pp.25-20 (1998). For additional reviews of gene therapy technology see Friedmann, Science, 244: 1275-1281 (1989); Verma, Scientific American: 68-84 (1990); and Miller, Nature, 357: 455-460 (1992). Introduction of any one of the nucleotides of the present invention or a gene encoding the polypeptides of the present invention can also be accomplished with extrachromosomal substrates (transient expression) or artificial chromosomes (stable expression). Cells may also be cultured ex vivo in the presence of proteins of the present invention in order to proliferate or to produce a desired effect on or activity in such cells. Treated cells can then be introduced in vivo for therapeutic purposes. Alternatively, it is contemplated that in other human disease states, preventing the expression of or inhibiting the activity of polypeptides of the invention will be useful in treating the disease states. It is contemplated that antisense therapy or gene therapy could be applied to negatively regulate the expression of polypeptides of the invention.

[0143] Other methods inhibiting expression of a protein include the introduction of antisense molecules to the nucleic acids of the present invention, their complements, or their translated RNA sequences, by methods known in the art Further, the polypeptides of the present invention can be inhibited by using targeted deletion methods, or the insertion of a negative regulatory element such as a silencer, which is tissue specific.

[0144] The present invention still further provides cells genetically engineered in vivo to express the polynucleotides of the invention, wherein such polynucleotides are in operative association with a regulatory sequence heterologous to the host cell which drives expression of the polynucleotides in the cell. These methods can be used to increase or decrease the expression of the polynucleotides of the present invention.

[0145] Knowledge of DNA sequences provided by the invention allows for modification of cells to permit, increase, or decrease, expression of endogenous polypeptide. Cells can be modified (e.g., by homologous recombination) to provide increased polypeptide expression by replacing, in whole or in part, the naturally occurring promoter with all or part of a heterologous promoter so that the cells express the protein at higher levels. The heterologous promoter is inserted in such a manner that it is operatively linked to the desired protein encoding sequences. See, for example, PCT International Publication No. WO 94/12650, PCT International Publication No. WO 92/20808, and PCT International Publication No. WO 91/09955. It is also contemplated that, in addition to heterologous promoter DNA, amplifiable marker DNA (e.g., ada, dhfr, and the multifunctional CAD gene which encodes carbamyl phosphate synthase, aspartate transcarbamylase, and dihydroorotase) and/or intron DNA may be inserted along with the heterologous promoter DNA. If linked to the desired protein coding sequence, amplification of the marker DNA by standard selection methods result in co-amplification of the desired protein coding sequences in the cells.

[0146] In another embodiment of the present invention, cells and tissues may be engineered to express an endogenous gene comprising the polynucleotides of the invention under the control of inducible regulatory elements, in which case the regulatory sequences of the endogenous gene may be replaced by homologous recombination. As described herein, gene targeting can be used to replace a gene's existing regulatory region with a regulatory sequence isolated from a different gene or a novel regulatory sequence synthesized by genetic engineering methods. Such regulatory sequences may be comprised of promoters, enhancers, scaffold-attachment regions, negative regulatory elements, transcriptional initiation sites, regulatory protein binding sites or combinations of said sequences. Alternatively, sequences which affect the structure or stability of the RNA or protein produced may be replaced, removed, added, or otherwise modified by targeting. These sequences include polyadenylation signals, mRNA stability elements, splice sites, leader sequences for enhancing or modifying transport or secretion properties of the protein or other sequences which alter or improve the function or stability of protein or RNA molecules.

[0147] The targeting event may be a simple insertion of the regulatory sequence, placing the gene under the control of the new regulatory sequence, e.g., inserting a new promoter or enhancer or both upstream of a gene. Alternatively, the targeting event may be a simple deletion of a regulatory element, such as the deletion of a tissue-specific negative regulatory element. Alternatively, the targeting event may replace an existing element; for example, a tissue-specific enhancer can be replaced by an enhancer that has broader or different cell-type specificity than the naturally occurring elements. Here, the naturally occurring sequences are deleted and new sequences are added. In all cases, the identification of the targeting event may be facilitated by the use of one or more selectable marker genes that are contiguous with the targeting DNA, allowing for the selection of cells in which the exogenous DNA has integrated into the cell genome. The identification of the targeting event may also be facilitated by the use of one or more marker genes exhibiting the property of negative selection, such that the negatively selectable marker is linked to the exogenous DNA, but configured such that the negatively selectable marker flanks the targeting sequence, and such that a correct homologous recombination event with sequences in the host cell genome does not result in the stable integration of the negatively selectable marker. Markers useful for this purpose include the Herpes Simplex Virus thymidine kinase (TK) gene or the bacterial xanthine-guanine phosphoribosyl-transferase (gpt) gene.

[0148] The gene targeting or gene activation techniques which can be used in accordance with this aspect of the invention are more particularly described in U.S. Pat. No. 5,272,071 to Chappel; U.S. Pat. No. 5,578,461 to Sherwin et al.; International Application No. PCT/US92/09627 (WO93/09222) by Selden et al.; and International Application No. PCT/US90/06436 (WO91/06667) by Skoultchi et al., each of which is incorporated by reference herein in its entirety.

[0149] 4.9 Transgenic Animals

[0150] In preferred methods to determine biological functions of the polypeptides of the invention in vivo, one or more genes provided by the invention are either over expressed or inactivated in the germ line of animals using homologous recombination [Capecchi, Science 244:1288-1292 (1989)]. Animals in which the gene is over expressed, under the regulatory control of exogenous or endogenous promoter elements, are known as transgenic animals. Animals in which an endogenous gene has been inactivated by homologous recombination are referred to as “knockout” animals. Knockout animals, preferably non-human mammals, can be prepared as described in U.S. Pat. No. 5,557,032, incorporated herein by reference. Transgenic animals are useful to determine the roles polypeptides of the invention play in biological processes, and preferably in disease states. Transgenic animals are useful as model systems to identify compounds that modulate lipid metabolism. Transgenic animals, preferably non-human mammals, are produced using methods as described in U.S. Pat. No. 5,489,743 and PCT Publication No. WO94/28122, incorporated herein by reference.

[0151] Transgenic animals can be prepared wherein all or part of a promoter of the polynucleotides of the invention is either activated or inactivated to alter the level of expression of the polypeptides of the invention. Inactivation can be carried out using homologous recombination methods described above. Activation can be achieved by supplementing or even replacing the homologous promoter to provide for increased protein expression. The homologous promoter can be supplemented by insertion of one or more heterologous enhancer elements known to confer promoter activation in a particular tissue.

[0152] The polynucleotides of the present invention also make possible the development, through, e.g., homologous recombination or knock out strategies, of animals that fail to express polypeptides of the invention or that express a variant polypeptide. Such animals are useful as models for studying the in vivo activities of polypeptide as well as for studying modulators of the polypeptides of the invention.

[0153] In preferred methods to determine biological functions of the polypeptides of the invention in vivo, one or more genes provided by the invention are either over expressed or inactivated in the germ line of animals using homologous recombination [Capecchi, Science 244:1288-1292 (1989)]. Animals in which the gene is over expressed, under the regulatory control of exogenous or endogenous promoter elements, are known as transgenic animals. Animals in which an endogenous gene has been inactivated by homologous recombination are referred to as “knockout” animals. Knockout animals, preferably non-human mammals, can be prepared as described in U.S. Pat. No. 5,557,032, incorporated herein by reference. Transgenic animals are useful to determine the roles polypeptides of the invention play in biological processes, and preferably in disease states. Transgenic animals are useful as model systems to identify compounds that modulate lipid metabolism. Transgenic animals, preferably non-human mammals, are produced using methods as described in U.S. Pat. No. 5,489,743 and PCT Publication No. WO94/28122, incorporated herein by reference.

[0154] Transgenic animals can be prepared wherein all or part of the polynucleotides of the invention promoter is either activated or inactivated to alter the level of expression of the polypeptides of the invention. Inactivation can be carried out using homologous recombination methods described above. Activation can be achieved by supplementing or even replacing the homologous promoter to provide for increased protein expression. The homologous promoter can be supplemented by insertion of one or more heterologous enhancer elements known to confer promoter activation in a particular tissue.

[0155] 4.10 Uses and Biological Activity

[0156] The polynucleotides and proteins of the present invention are expected to exhibit one or more of the uses or biological activities (including those associated with assays cited herein) identified herein. Uses or activities described for proteins of the present invention may be provided by administration or use of such proteins or of polynucleotides encoding such proteins (such as, for example, in gene therapies or vectors suitable for introduction of DNA). The mechanism underlying the particular condition or pathology will dictate whether the polypeptides of the invention, the polynucleotides of the invention or modulators (activators or inhibitors) thereof would be beneficial to the subject in need of treatment. Thus, “therapeutic compositions of the invention” include compositions comprising isolated polynucleotides (including recombinant DNA molecules, cloned genes and degenerate variants thereof) or polypeptides of the invention (including full length protein, mature protein and truncations or domains thereof), or compounds and other substances that modulate the overall activity of the target gene products, either at the level of target gene/protein expression or target protein activity. Such modulators include polypeptides, analogs, (variants), including fragments and fusion proteins, antibodies and other binding proteins; chemical compounds that directly or indirectly activate or inhibit the polypeptides of the invention (identified, e.g., via drug screening assays as described herein); antisense polynucleotides and polynucleotides suitable for triple helix formation; and in particular antibodies or other binding partners that specifically recognize one or more epitopes of the polypeptides of the invention.

[0157] The polypeptides of the present invention may likewise be involved in cellular activation or in one of the other physiological pathways described herein.

[0158] 4.10.1 Research Uses and Utilities

[0159] The polynucleotides provided by the present invention can be used by the research community for various purposes. The polynucleotides can be used to express recombinant protein for analysis, characterization or therapeutic use; as markers for tissues in which the corresponding protein is preferentially expressed (either constitutively or at a particular stage of tissue differentiation or development or in disease states); as molecular weight markers on gels; as chromosome markers or tags (when labeled) to identify chromosomes or to map related gene positions; to compare with endogenous DNA sequences in patients to identify potential genetic disorders; as probes to hybridize and thus discover novel, related DNA sequences; as a source of information to derive PCR primers for genetic fingerprinting; as a probe to “subtract-out” known sequences in the process of discovering other novel polynucleotides; for selecting and making oligomers for attachment to a “gene chip” or other support, including for examination of expression patterns; to raise anti-protein antibodies using DNA immunization techniques; and as an antigen to raise anti-DNA antibodies or elicit another immune response. Where the polynucleotide encodes a protein which binds or potentially binds to another protein (such as, for example, in a receptor-ligand interaction), the polynucleotide can also be used in interaction trap assays (such as, for example, that described in Gyuris et al., Cell 75:791-803 (1993)) to identify polynucleotides encoding the other protein with which binding occurs or to identify inhibitors of the binding interaction.

[0160] The polypeptides provided by the present invention can similarly be used in assays to determine biological activity, including in a panel of multiple proteins for high-throughput screening; to raise antibodies or to elicit another immune response; as a reagent (including the labeled reagent) in assays designed to quantitatively determine levels of the protein (or its receptor) in biological fluids; as markers for tissues in which the corresponding polypeptide is preferentially expressed (either constitutively or at a particular stage of tissue differentiation or development or in a disease state); and, of course, to isolate correlative receptors or ligands. Proteins involved in these binding interactions can also be used to screen for peptide or small molecule inhibitors or agonists of the binding interaction.

[0161] Any or all of these research utilities are capable of being developed into reagent grade or kit format for commercialization as research products.

[0162] Methods for performing the uses listed above are well known to those skilled in the art. References disclosing such methods include without limitation “Molecular Cloning: A Laboratory Manual”, 2d ed., Cold Spring Harbor Laboratory Press, Sambrook, J., E. F. Fritsch and T. Maniatis eds., 1989, and “Methods in Enzymology: Guide to Molecular Cloning Techniques”, Academic Press, Berger, S. L. and A. R. Kimmel eds., 1987.

[0163] 4.10.2 Nutritional Uses

[0164] Polynucleotides and polypeptides of the present invention can also be used as nutritional sources or supplements. Such uses include without limitation use as a protein or amino acid supplement, use as a carbon source, use as a nitrogen source and use as a source of carbohydrate. In such cases the polypeptide or polynucleotide of the invention can be added to the feed of a particular organism or can be administered as a separate solid or liquid preparation, such as in the form of powder, pills, solutions, suspensions or capsules. In the case of microorganisms, the polypeptide or polynucleotide of the invention can be added to the medium in or on which the microorganism is cultured.

[0165] 4.10.3 Cytokine and Cell Proliferation/Differentiation Activity

[0166] A polypeptide of the present invention may exhibit activity relating to cytokine, cell proliferation (either inducing or inhibiting) or cell differentiation (either inducing or inhibiting) activity or may induce production of other cytokines in certain cell populations. A polynucleotide of the invention can encode a polypeptide exhibiting such attributes. Many protein factors discovered to date, including all known cytokines, have exhibited activity in one or more factor-dependent cell proliferation assays, and hence the assays serve as a convenient confirmation of cytokine activity. The activity of therapeutic compositions of the present invention is evidenced by any one of a number of routine factor dependent cell proliferation assays for cell lines including, without limitation, 32D, DA2, DA1G, T10, B9, B9/11, BaF3, MC9/G, M+(preB M+), 2E8, RB5, DA1, 123, T1165, HT2, CTLL2, TF-1, Mo7e, CMK, HUVEC, and Caco. Therapeutic compositions of the invention can be used in the following:

[0167] Assays for T-cell or thymocyte proliferation include without limitation those described in: Current Protocols in Immunology, Ed by J. E. Coligan, A. M. Kruisbeek, D. H. Margulies, E. M. Shevach, W. Strober, Pub. Greene Publishing Associates and Wiley-Interscience (Chapter 3, In Vitro assays for Mouse Lymphocyte Function 3.1-3.19; Chapter 7, Immunologic studies in Humans); Takai et al., J. Immunol. 137:3494-3500, 1986; Bertagnolli et al., J. Immunol. 145:1706-1712, 1990; Bertagnolli et al., Cellular Immunology 133:327-341, 1991; Bertagnolli, et al., I. Immunol. 149:3778-3783, 1992; Bowman et al., I. Immunol. 152:1756-1761, 1994.

[0168] Assays for cytokine production and/or proliferation of spleen cells, lymph node cells or thymocytes include, without limitation, those described in: Polyclonal T cell stimulation, Kruisbeek, A. M. and Shevach, E. M. In Current Protocols in Immunology. J. E. e.a. Coligan eds. Vol 1 pp. 3.12.1-3.12.14, John Wiley and Sons, Toronto. 1994; and Measurement of mouse and human interleukin-γ, Schreiber, R. D. In Current Protocols in Immunology. J. E. e.a. Coligan eds. Vol 1 pp. 6.8.1-6.8.8, John Wiley and Sons, Toronto. 1994.

[0169] Assays for proliferation and differentiation of hematopoietic and lymphopoietic cells include, without limitation, those described in: Measurement of Human and Murine Interleukin 2 and Interleukin 4, Bottomly, K., Davis, L. S. and Lipsky, P. E. In Current Protocols in Immunology. J. E. e.a. Coligan eds. Vol 1 pp. 6.3.1-6.3.12, John Wiley and Sons, Toronto. 1991; deVries et al., J. Exp. Med. 173:1205-1211, 1991; Moreau et al., Nature 336:690-692, 1988; Greenberger et al., Proc. Natl. Acad. Sci. U.S.A. 80:2931-2938, 1983; Measurement of mouse and human interleukin 6—Nordan, R. In Current Protocols in Immunology. J. E. Coligan eds. Vol 1 pp. 6.6.1-6.6.5, John Wiley and Sons, Toronto. 1991; Smith et al., Proc. Natl. Aced. Sci. U.S.A. 83:1857-1861, 1986; Measurement of human Interleukin 11—Bennett, F., Giannotti, J., Clark, S. C. and Turner, K. J. In Current Protocols in Immunology. J. E. Coligan eds. Vol 1 pp. 6.15.1 John Wiley and Sons, Toronto. 1991; Measurement of mouse and human Interleukin 9—Ciarletta, A., Giannotti, J., Clark, S. C. and Turner, K. J. In Current Protocols in Immunology. J. E. Coligan eds. Vol 1 pp. 6.13.1, John Wiley and Sons, Toronto. 1991.

[0170] Assays for T-cell clone responses to antigens (which will identify, among others, proteins that affect APC-T cell interactions as well as direct T-cell effects by measuring proliferation and cytokine production) include, without limitation, those described in: Current Protocols in Immunology, Ed by J. E. Coligan, A. M. Kruisbeek, D. H. Margulies, E. M. Shevach, W Strober, Pub. Greene Publishing Associates and Wiley-Interscience (Chapter 3, In Vitro assays for Mouse Lymphocyte Function; Chapter 6, Cytokines and their cellular receptors; Chapter 7, Immunologic studies in Humans); Weinberger et al., Proc. Natl. Acad. Sci. USA 77:6091-6095, 1980; Weinberger et al., Eur. J. Immun. 11:405411, 1981; Takai et al., J. Immunol. 137:3494-3500, 1986; Takai et al., J. Immunol. 140:508-512, 1988.

[0171] 4.10.4 Stem Cell Growth Factor Activity

[0172] A polypeptide of the present invention may exhibit stem cell growth factor activity and be involved in the proliferation, differentiation and survival of pluripotent and totipotent stem cells including primordial germ cells, embryonic stem cells, hematopoietic stem cells and/or germ line stem cells. Administration of the polypeptide of the invention to stem cells in vivo or ex vivo is expected to maintain and expand cell populations in a totipotential or pluripotential state which would be useful for re-engineering damaged or diseased tissues, transplantation, manufacture of bio-pharmaceuticals and the development of bio-sensors. The ability to produce large quantities of human cells has important working applications for the production of human proteins which currently must be obtained from non-human sources or donors, implantation of cells to treat diseases such as Parkinson's, Alzheimer's and other neurodegenerative diseases; tissues for grafting such as bone marrow, skin, cartilage, tendons, bone, muscle (including cardiac muscle), blood vessels, cornea, neural cells, gastrointestinal cells and others; and organs for transplantation such as kidney, liver, pancreas (including islet cells), heart and lung.

[0173] It is contemplated that multiple different exogenous growth factors and/or cytokines may be administered in combination with the polypeptide of the invention to achieve the desired effect, including any of the growth factors listed herein, other stem cell maintenance factors, and specifically including stem cell factor (SCF), leukemia inhibitory factor (LIF), Flt-3 ligand (Flt-3L), any of the interleukins, recombinant soluble IL-6 receptor fused to 1L-6, macrophage inflammatory protein 1-alpha (MIP-1-alpha), G-CSF, GM-CSF, thrombopoietin (TPO), platelet factor 4 (PF-4), platelet-derived growth factor (PDGF), neural growth factors and basic fibroblast growth factor (bFGF).

[0174] Since totipotent stem cells can give rise to virtually any mature cell type, expansion of these cells in culture will facilitate the production of large quantities of mature cells. Techniques for culturing stem cells are known in the art and administration of polypeptides of the invention, optionally with other growth factors and/or cytokines, is expected to enhance the survival and proliferation of the stem cell populations. This can be accomplished by direct administration of the polypeptide of the invention to the culture medium. Alternatively, stroma cells transfected with a polynucleotide that encodes for the polypeptide of the invention can be used as a feeder layer for the stem cell populations in culture or in vivo. Stromal support cells for feeder layers may include embryonic bone marrow fibroblasts, bone marrow stromal cells, fetal liver cells, or cultured embryonic fibroblasts (see U.S. Pat. No. 5,690,926).

[0175] Stem cells themselves can be transfected with a polynucleotide of the invention to induce autocrine expression of the polypeptide of the invention. This will allow for generation of undifferentiated totipotential/pluripotential stem cell lines that are useful as is or that can then be differentiated into the desired mature cell types. These stable cell lines can also serve as a source of undifferentiated totipotential/pluripotential mRNA to create cDNA libraries and templates for polymerase chain reaction experiments. These studies would allow for the isolation and identification of differentially expressed genes in stem cell populations that regulate stem cell proliferation and/or maintenance.

[0176] Expansion and maintenance of totipotent stem cell populations will be useful in the treatment of many pathological conditions. For example, polypeptides of the present invention may be used to manipulate stem cells in culture to give rise to neuroepithelial cells that can be used to augment or replace cells damaged by illness, autoimmune disease, accidental damage or genetic disorders. The polypeptide of the invention may be useful for inducing the proliferation of neural cells and for the regeneration of nerve and brain tissue, i.e. for the treatment of central and peripheral nervous system diseases and neuropathies, as well as mechanical and traumatic disorders which involve degeneration, death or trauma to neural cells or nerve tissue. In addition, the expanded stem cell populations can also be genetically altered for gene therapy purposes and to decrease host rejection of replacement tissues after grafting or implantation.

[0177] Expression of the polypeptide of the invention and its effect on stem cells can also be manipulated to achieve controlled differentiation of the stem cells into more differentiated cell types. A broadly applicable method of obtaining pure populations of a specific differentiated cell type from undifferentiated stem cell populations involves the use of a cell-type specific promoter driving a selectable marker. The selectable marker allows only cells of the desired type to survive. For example, stem cells can be induced to differentiate into cardiomyocytes (Wobus et al., Differentiation, 48: 173-182, (1991); Klug et al., J. Clin. Invest., 98(1): 216-224, (1998)) or skeletal muscle cells (Browder, L. W. In: Principles of Tissue Engineering eds. Lanza et al., Academic Press (1997)). Alternatively, directed differentiation of stem cells can be accomplished by culturing the stem cells in the presence of a differentiation factor such as retinoic acid and an antagonist of the polypeptide of the invention which would inhibit the effects of endogenous stem cell factor activity and allow differentiation to proceed.

[0178] In vitro cultures of stem cells can be used to determine if the polypeptide of the invention exhibits stem cell growth factor activity. Stem cells are isolated from any one of various cell sources (including hematopoietic stem cells and embryonic stem cells) and cultured on a feeder layer, as described by Thompson et al. Proc. Natl. Acad. Sci, U.S.A., 92: 7844-7848 (1995), in the presence of the polypeptide of the invention alone or in combination with other growth factors or cytokines. The ability of the polypeptide of the invention to induce stem cells proliferation is determined by colony formation on semi-solid support e.g. as described by Bernstein et al., Blood, 77: 2316-2321 (1991).

[0179] 4.10.5 Hematopoiesis Regulating Activity

[0180] A polypeptide of the present invention may be involved in regulation of hematopoiesis and, consequently, in the treatment of myeloid or lymphoid cell disorders. Even marginal biological activity in support of colony forming cells or of factor-dependent cell lines indicates involvement in regulating hematopoiesis, e.g. in supporting the growth and proliferation of erythroid progenitor cells alone or in combination with other cytokines, thereby indicating utility, for example, in treating various anemias or for use in conjunction with irradiation/chemotherapy to stimulate the production of erythroid precursors and/or erythroid cells; in supporting the growth and proliferation of myeloid cells such as granulocytes and monocytes/macrophages (i.e., traditional CSF activity) useful, for example, in conjunction with chemotherapy to prevent or treat consequent myelo-suppression; in supporting the growth and proliferation of megakaryocytes and consequently of platelets thereby allowing prevention or treatment of various platelet disorders such as thrombocytopenia, and generally for use in place of or complimentary to platelet transfusions; and/or in supporting the growth and proliferation of hematopoietic stem cells which are capable of maturing to any and all of the above-mentioned hematopoietic cells and therefore find therapeutic utility in various stem cell disorders (such as those usually treated with transplantation, including, without limitation, aplastic anemia and paroxysmal nocturnal hemoglobinuria), as well as in repopulating the stem cell compartment post irradiation/chemotherapy, either in-vivo or ex-vivo (i.e., in conjunction with bone marrow transplantation or with peripheral progenitor cell transplantation (homologous or heterologous)) as normal cells or genetically manipulated for gene therapy.

[0181] Therapeutic compositions of the invention can be used in the following:

[0182] Suitable assays for proliferation and differentiation of various hematopoietic lines are cited above.

[0183] Assays for embryonic stem cell differentiation (which will identify, among others, proteins that influence embryonic differentiation hematopoiesis) include, without limitation, those described in: Johansson et al. Cellular Biology 15:141-151, 1995; Keller et al., Molecular and Cellular Biology 13:473486, 1993; McClanahan et al., Blood 81:2903-2915, 1993.

[0184] Assays for stem cell survival and differentiation (which will identify, among others, proteins that regulate lympho-hematopoiesis) include, without limitation, those described in: Methylcellulose colony forming assays, Freshney, M. G. In Culture of Hematopoietic Cells. R. I. Freshney, et al. eds. Vol pp. 265-268, Wiley-Liss, Inc., New York, N.Y. 1994; Hirayama et al., Proc. Natl. Acad. Sci. USA 89:5907-5911, 1992; Primitive hematopoietic colony forming cells with high proliferative potential, McNiece, I. K. and Briddell, R A. In Culture of Hematopoietic Cells. R. I. Freshney, et al. eds. Vol pp. 23-39, Wiley-Liss, Inc., New York, N.Y. 1994; Neben et al., Experimental Hematology 22:353-359, 1994; Cobblestone area forming cell assay, Ploemacher, R. E. In Culture of Hematopoietic Cells. R. I. Freshney, et al. eds. Vol pp. 1-21, Wiley-Liss, Inc., New York, N.Y. 1994; Long term bone marrow cultures in the presence of stromal cells, Spooncer, E., Dexter, M. and Allen, T. In Culture of Hematopoietic Cells. R. I. Freshney, et al. eds. Vol pp. 163-179, Wiley-Liss, Inc., New York, N.Y. 1994; Long term culture initiating cell assay, Sutherland, H. J. In Culture of Hematopoietic Cells. R. I. Freshney, et al. eds. Vol pp. 139-162, Wiley-Liss, Inc., New York, N.Y. 1994.

[0185] 4.10.6 Tissue Growth Activity

[0186] A polypeptide of the present invention also may be involved in bone, cartilage, tendon, ligament and/or nerve tissue growth or regeneration, as well as in wound healing and tissue repair and replacement, and in healing of burns, incisions and ulcers.

[0187] A polypeptide of the present invention which induces cartilage and/or bone growth in circumstances where bone is not normally formed, has application in the healing of bone fractures and cartilage damage or defects in humans and other animals. Compositions of a polypeptide, antibody, binding partner, or other modulator of the invention may have prophylactic use in closed as well as open fracture reduction and also in the improved fixation of artificial joints. De novo bone formation induced by an osteogenic agent contributes to the repair of congenital, trauma induced, or oncologic resection induced craniofacial defects, and also is useful in cosmetic plastic surgery.

[0188] A polypeptide of this invention may also be involved in attracting bone-forming cells, stimulating growth of bone-forming cells, or inducing differentiation of progenitors of bone-forming cells. Treatment of osteoporosis, osteoarthritis, bone degenerative disorders, or periodontal disease, such as through stimulation of bone and/or cartilage repair or by blocking inflammation or processes of tissue destruction (collagenase activity, osteoclast activity, etc.) mediated by inflammatory processes may also be possible using the composition of the invention.

[0189] Another category of tissue regeneration activity that may involve the polypeptide of the present invention is tendon/ligament formation. Induction of tendon/ligament-like tissue or other tissue formation in circumstances where such tissue is not normally formed, has application in the healing of tendon or ligament tears, deformities and other tendon or ligament defects in humans and other animals. Such a preparation employing a tendon/ligament-like tissue inducing protein may have prophylactic use in preventing damage to tendon or ligament tissue, as well as use in the improved fixation of tendon or ligament to bone or other tissues, and in repairing defects to tendon or ligament tissue. De novo tendon/ligament-like tissue formation induced by a composition of the present invention contributes to the repair of congenital, trauma induced, or other tendon or ligament defects of other origin, and is also useful in cosmetic plastic surgery for attachment or repair of tendons or ligaments. The compositions of the present invention may provide environment to attract tendon- or ligament-forming cells, stimulate growth of tendon- or ligament-forming cells, induce differentiation of progenitors of tendon- or ligament-forming cells, or induce growth of tendon/ligament cells or progenitors ex vivo for return in vivo to effect tissue repair. The compositions of the invention may also be useful in the treatment of tendinitis, carpal tunnel syndrome and other tendon or ligament defects. The compositions may also include an appropriate matrix and/or sequestering agent as a carrier as is well known in the art.

[0190] The compositions of the present invention may also be useful for proliferation of neural cells and for regeneration of nerve and brain tissue, i.e. for the treatment of central and peripheral nervous system diseases and neuropathies, as well as mechanical and traumatic disorders, which involve degeneration, death or trauma to neural cells or nerve tissue. More specifically, a composition may be used in the treatment of diseases of the peripheral nervous system, such as peripheral nerve injuries, peripheral neuropathy and localized neuropathies, and central nervous system diseases, such as Alzheimer's, Parkinson's disease, Huntington's disease, amyotrophic lateral sclerosis, and Shy-Drager syndrome. Further conditions which may be treated in accordance with the present invention include mechanical and traumatic disorders, such as spinal cord disorders, head trauma and cerebrovascular diseases such as stroke. Peripheral neuropathies resulting from chemotherapy or other medical therapies may also be treatable using a composition of the invention.

[0191] Compositions of the invention may also be useful to promote better or faster closure of non-healing wounds, including without limitation pressure ulcers, ulcers associated with vascular insufficiency, surgical and traumatic wounds, and the like.

[0192] Compositions of the present invention may also be involved in the generation or regeneration of other tissues, such as organs (including, for example, pancreas, liver, intestine, kidney, skin, endothelium), muscle (smooth, skeletal or cardiac) and vascular (including vascular endothelium) tissue, or for promoting the growth of cells comprising such tissues. Part of the desired effects may be by inhibition or modulation of fibrotic scarring may allow normal tissue to regenerate. A polypeptide of the present invention may also exhibit angiogenic activity.

[0193] A composition of the present invention may also be useful for gut protection or regeneration and treatment of lung or liver fibrosis, reperfusion injury in various tissues, and conditions resulting from systemic cytokine damage.

[0194] A composition of the present invention may also be useful for promoting or inhibiting differentiation of tissues described above from precursor tissues or cells; or for inhibiting the growth of tissues described above.

[0195] Therapeutic compositions of the invention can be used in the following:

[0196] Assays for tissue generation activity include, without limitation, those described in: International Patent Publication No. WO95/16035 (bone, cartilage, tendon); International Patent Publication No. WO95/05846 (nerve, neuronal); International Patent Publication No. WO91/07491 (skin, endothelium).

[0197] Assays for wound healing activity include, without limitation, those described in: Winter, Epidermal Wound Healing, pps. 71-112 (Maibach, H. I. and Rovee, D. T., eds.), Year Book Medical Publishers, Inc., Chicago, as modified by Eaglstein and Mertz, J. Invest. Dermatol 71:382-84 (1978).

[0198] 4.10.7 Immune Stimulating or Suppressing Activity

[0199] A polypeptide of the present invention may also exhibit immune stimulating or immune suppressing activity, including without limitation the activities for which assays are described herein. A polynucleotide of the invention can encode a polypeptide exhibiting such activities. A protein may be useful in the treatment of various immune deficiencies and disorders (including severe combined immunodeficiency (SCID)), e.g., in regulating (up or down) growth and proliferation of T and/or B lymphocytes, as well as effecting the cytolytic activity of NK cells and other cell populations. These immune deficiencies may be genetic or be caused by viral (e.g., HIV) as well as bacterial or fungal infections, or may result from autoimmune disorders. More specifically, infectious diseases causes by viral, bacterial, fungal or other infection may be treatable using a protein of the present invention, including infections by HIV, hepatitis viruses, herpes viruses, mycobacteria, Leishmania spp., malaria spp. and various fungal infections such as candidiasis. Of course, in this regard, proteins of the present invention may also be useful where a boost to the immune system generally may be desirable, i.e., in the treatment of cancer.

[0200] Autoimmune disorders which may be treated using a protein of the present invention include, for example, connective tissue disease, multiple sclerosis, systemic lupus erythematosus, rheumatoid arthritis, autoimmune pulmonary inflammation, Guillain-Barre syndrome, autoimmune thyroiditis, insulin dependent diabetes mellitis, myasthenia gravis, graft-versus-host disease and autoimmune inflammatory eye disease. Such a protein (or antagonists thereof, including antibodies) of the present invention may also to be useful in the treatment of allergic reactions and conditions (e.g., anaphylaxis, serum sickness, drug reactions, food allergies, insect venom allergies, mastocytosis, allergic rhinitis, hypersensitivity pneumonitis, urticaria, angioedema, eczema, atopic dermatitis, allergic contact dermatitis, erythema multiforme, Stevens-Johnson syndrome, allergic conjunctivitis, atopic keratoconjunctivitis, venereal keratoconjunctivitis, giant papillary conjunctivitis and contact allergies), such as asthma (particularly allergic asthma) or other respiratory problems. Other conditions, in which immune suppression is desired (including, for example, organ transplantation), may also be treatable using a protein (or antagonists thereof) of the present invention. The therapeutic effects of the polypeptides or antagonists thereof on allergic reactions can be evaluated by in vivo animals models such as the cumulative contact enhancement test (Lasthom et al., Toxicology 125: 59-66, 1998), skin prick test (Hoffmann et al., Allergy 54: 446-54, 1999), guinea pig skin sensitization test (Vohr et al., Arch. Toxocol. 73: 501-9), and murine local lymph node assay (Kimber et al., J. Toxicol. Environ. Health 53: 563-79).

[0201] Using the proteins of the invention it may also be possible to modulate immune responses, in a number of ways. Down regulation may be in the form of inhibiting or blocking an immune response already in progress or may involve preventing the induction of an immune response. The functions of activated T cells may be inhibited by suppressing T cell responses or by inducing specific tolerance in T cells, or both. Immunosuppression of T cell responses is generally an active, non-antigen-specific, process which requires continuous exposure of the T cells to the suppressive agent. Tolerance, which involves inducing non-responsiveness or anergy in T cells, is distinguishable from immunosuppression in that it is generally antigen-specific and persists after exposure to the tolerizing agent has ceased. Operationally, tolerance can be demonstrated by the lack of a T cell response upon reexposure to specific antigen in the absence of the tolerizing agent.

[0202] Down regulating or preventing one or more antigen functions (including without limitation B lymphocyte antigen functions (such as, for example, B7)), e.g., preventing high level lymphokine synthesis by activated T cells, will be useful in situations of tissue, skin and organ transplantation and in graft-versus-host disease (GVHD). For example, blockage of T cell function should result in reduced tissue destruction in tissue transplantation. Typically, in tissue transplants, rejection of the transplant is initiated through its recognition as foreign by T cells, followed by an immune reaction that destroys the transplant. The administration of a therapeutic composition of the invention may prevent cytokine synthesis by immune cells, such as T cells, and thus acts as an immunosuppressant. Moreover, a lack of costimulation may also be sufficient to anergize the T cells, thereby inducing tolerance in a subject. Induction of long-term tolerance by B lymphocyte antigen-blocking reagents may avoid the necessity of repeated administration of these blocking reagents. To achieve sufficient immunosuppression or tolerance in a subject, it may also be necessary to block the function of a combination of B lymphocyte antigens.

[0203] The efficacy of particular therapeutic compositions in preventing organ transplant rejection or GVHD can be assessed using animal models that are predictive of efficacy in humans. Examples of appropriate systems which can be used include allogeneic cardiac grafts in rats and xenogeneic pancreatic islet cell grafts in mice, both of which have been used to examine the immunosuppressive effects of CTLA4Ig fusion proteins in vivo as described in Lenschow et al., Science 257:789-792 (1992) and Turka et al., Proc. Natl. Acad. Sci USA, 89:11102-11105 (1992). In addition, murine models of GVHD (see Paul ed., Fundamental Immunology, Raven Press, New York, 1989, pp. 846-847) can be used to determine the effect of therapeutic compositions of the invention on the development of that disease.

[0204] Blocking antigen function may also be therapeutically useful for treating autoimmune diseases. Many autoimmune disorders are the result of inappropriate activation of T cells that are reactive against self tissue and which promote the production of cytokines and autoantibodies involved in the pathology of the diseases. Preventing the activation of autoreactive T cells may reduce or eliminate disease symptoms. Administration of reagents which block stimulation of T cells can be used to inhibit T cell activation and prevent production of autoantibodies or T cell-derived cytokines which may be involved in the disease process. Additionally, blocking reagents may induce antigen-specific tolerance of autoreactive T cells which could lead to long-term relief from the disease. The efficacy of blocking reagents in preventing or alleviating autoimmune disorders can be determined using a number of well-characterized animal models of human autoimmune diseases. Examples include murine experimental autoimmune encephalitis, systemic lupus erythmatosis in MRL/lpr/lpr mice or NZB hybrid mice, murine autoimmune collagen arthritis, diabetes mellitus in NOD mice and BB rats, and murine experimental myasthenia gravis (see Paul ed., Fundamental Immunology, Raven Press, New York, 1989, pp. 840-856).

[0205] Upregulation of an antigen function (e.g., a B lymphocyte antigen function), as a means of up regulating immune responses, may also be useful in therapy. Upregulation of immune responses may be in the form of enhancing an existing immune response or eliciting an initial immune response. For example, enhancing an immune response may be useful in cases of viral infection, including systemic viral diseases such as influenza, the common cold, and encephalitis.

[0206] Alternatively, anti-viral immune responses may be enhanced in an infected patient by removing T cells from the patient, costimulating the T cells in vitro with viral antigen-pulsed APCs either expressing a peptide of the present invention or together with a stimulatory form of a soluble peptide of the present invention and reintroducing the in vitro activated T cells into the patient. Another method of enhancing anti-viral immune responses would be to isolate infected cells from a patient, transfect them with a nucleic acid encoding a protein of the present invention as described herein such that the cells express all or a portion of the protein on their surface, and reintroduce the transfected cells into the patient. The infected cells would now be capable of delivering a costimulatory signal to, and thereby activate, T cells in vivo.

[0207] A polypeptide of the present invention may provide the necessary stimulation signal to T cells to induce a T cell mediated immune response against the transfected tumor cells. In addition, tumor cells which lack MHC class I or MHC class II molecules, or which fail to reexpress sufficient mounts of MHC class I or MHC class II molecules, can be transfected with nucleic acid encoding all or a portion of (e.g., a cytoplasmic-domain truncated portion) of an MHC class I alpha chain protein and P2 microglobulin protein or an MHC class II alpha chain protein and an MHC class II beta chain protein to thereby express MHC class I or MHC class II proteins on the cell surface. Expression of the appropriate class I or class II MHC in conjunction with a peptide having the activity of a B lymphocyte antigen (e.g., B7-1, B7-2, B7-3) induces a T cell mediated immune response against the transfected tumor cell. Optionally, a gene encoding an antisense construct which blocks expression of an MHC class II associated protein, such as the invariant chain, can also be cotransfected with a DNA encoding a peptide having the activity of a B lymphocyte antigen to promote presentation of tumor associated antigens and induce tumor specific immunity. Thus, the induction of a T cell mediated immune response in a human subject may be sufficient to overcome tumor-specific tolerance in the subject.

[0208] The activity of a protein of the invention may, among other means, be measured by the following methods:

[0209] Suitable assays for thymocyte or splenocyte cytotoxicity include, without limitation, those described in: Current Protocols in Immunology, Ed by J. E. Coligan, A. M. Kruisbeek, D. H. Margulies, E. M. Shevach, W. Strober, Pub. Greene Publishing Associates and Wiley-Interscience (Chapter 3, In Vitro assays for Mouse Lymphocyte Function 3.1-3.19; Chapter 7, Immunologic studies in Humans); Herrmann et al., Proc. Natl. Acad. Sci. USA 78:2488-2492, 1981; Herrmann et al., J. Immunol. 128:1968-1974, 1982; Handa et al., J. Immunol. 135:1564-1572, 1985; Takai et al., I. Immunol. 137:3494-3500, 1986; Takai et al., J. Immunol. 140:508-512, 1988; Bowman et al., J. Virology 61:1992-1998; Bertagnolli et al., Cellular Immunology 133:327-341, 1991; Brown et al., J. Immunol. 153:3079-3092, 1994.

[0210] Assays for T-cell-dependent immunoglobulin responses and isotype switching (which will identify, among others, proteins that modulate T-cell dependent antibody responses and that affect Th1/Fh2 profiles) include, without limitation, those described in: Maliszewski, J. Immunol. 144:3028-3033, 1990; and Assays for B cell function: In vitro antibody production, Mond, J. J. and Brunswick, M. In Current Protocols in Immunology. J. E. e.a. Coligan eds. Vol 1 pp. 3.8.1-3.8.16, John Wiley and Sons, Toronto. 1994.

[0211] Mixed lymphocyte reaction (MLR) assays (which will identify, among others, proteins that generate predominantly Th1 and CTL responses) include, without limitation, those described in: Current Protocols in Immunology, Ed by J. E. Coligan, A. M. Kruisbeek, D. H. Margulies, E. M. Shevach, W. Strober, Pub. Greene Publishing Associates and Wiley-Interscience (Chapter 3, In Vitro assays for Mouse Lymphocyte Function 3.1-3.19; Chapter 7, Immunologic studies in Humans); Takai et al., J. Immunol. 137:3494-3500, 1986; Takai et al., J. Immunol. 140:508-512, 1988; Bertagnolli et al., J. Immunol. 149:3778-3783, 1992.

[0212] Dendritic cell-dependent assays (which will identify, among others, proteins expressed by dendritic cells that activate naive T-cells) include, without limitation, those described in: Guery et al., J. Immunol. 134:536-544, 1995; Inaba et al., Journal of Experimental Medicine 173:549-559, 1991; Macatonia et al., Journal of Immunology 154:5071-5079, 1995; Porgador et al., Journal of Experimental Medicine 182:255-260,1995; Nair et al., Journal of Virology 67:4062-4069, 1993; Huang et al., Science 264:961-965, 1994; Macatonia et al., Journal of Experimental Medicine 169:1255-1264, 1989; Bhardwaj et al., Journal of Clinical Investigation 94:797-807, 1994; and Inaba et al., Journal of Experimental Medicine 172:631-640, 1990.

[0213] Assays for lymphocyte survival/apoptosis (which will identify, among others, proteins that prevent apoptosis after superantigen induction and proteins that regulate lymphocyte homeostasis) include, without limitation, those described in: Darzynkiewicz et al., Cytometry 13:795-808, 1992; Gorczyca et al., Leukemia 7:659-670, 1993; Gorczyca et al., Cancer Research 53:1945-1951, 1993; Itoh et al., Cell 66:233-243, 1991; Zacharchuk, Journal of Immunology 145:4037-4045, 1990; Zamai et al., Cytometry 14:891-897, 1993; Gorczyca et al., International Journal of Oncology 1:639-648, 1992.

[0214] Assays for proteins that influence early steps of T-cell commitment and development include, without limitation, those described in: Antica et al., Blood 84:111-117, 1994; Fine et al., Cellular Immunology 155:111-122, 1994; Galy et al., Blood 85:2770-2778, 1995; Toki et al., Proc. Nat. Acad Sci. USA 88:7548-7551, 1991.

[0215] 4.10.8 Activin/Inhibin Activity

[0216] A polypeptide of the present invention may also exhibit activin- or inhibin-related activities. A polynucleotide of the invention may encode a polypeptide exhibiting such characteristics. Inhibins are characterized by their ability to inhibit the release of follicle stimulating hormone (FSH), while activins and are characterized by their ability to stimulate the release of follicle stimulating hormone (FSH). Thus, a polypeptide of the present invention, alone or in heterodimers with a member of the inhibin family, may be useful as a contraceptive based on the ability of inhibins to decrease fertility in female mammals and decrease spermatogenesis in male mammals. Administration of sufficient amounts of other inhibins can induce infertility in these mammals. Alternatively, the polypeptide of the invention, as a homodimer or as a heterodimer with other protein subunits of the inhibin group, may be useful as a fertility inducing therapeutic, based upon the ability of activin molecules in stimulating FSH release from cells of the anterior pituitary See, for example, U.S. Pat. No. 4,798,885. A polypeptide of the invention may also be useful for advancement of the onset of fertility in sexually immature mammals, so as to increase the lifetime reproductive performance of domestic animals such as, but not limited to, cows, sheep and pigs.

[0217] The activity of a polypeptide of the invention may, among other means, be measured by the following methods.

[0218] Assays for activin/inhibin activity include, without limitation, those described in: Vale et al., Endocrinology 91:562-572, 1972; Ling et al., Nature 321:779-782, 1986; Vale et al., Nature 321:776-779, 1986; Mason et al., Nature 318:659-663, 1985; Forage et al., Proc. Natl. Acad. Sci. USA 83:3091-3095, 1986.

[0219] 4.10.9 Chemotactic/Chemokinetic Activity

[0220] A polypeptide of the present invention may be involved in chemotactic or chemokinetic activity for mammalian cells, including, for example, monocytes, fibroblasts, neutrophils, T-cells, mast cells, eosinophils, epithelial and/or endothelial cells. A polynucleotide of the invention can encode a polypeptide exhibiting such attributes. Chemotactic and chemokinetic receptor activation can be used to mobilize or attract a desired cell population to a desired site of action. Chemotactic or chemokinetic compositions (e.g. proteins, antibodies, binding partners, or modulators of the invention) provide particular advantages in treatment of wounds and other trauma to tissues, as well as in treatment of localized infections. For example, attraction of lymphocytes, monocytes or neutrophils to tumors or sites of infection may result in improved immune responses against the tumor or infecting agent.

[0221] A protein or peptide has chemotactic activity for a particular cell population if it can stimulate, directly or indirectly, the directed orientation or movement of such cell population. Preferably, the protein or peptide has the ability to directly stimulate directed movement of cells. Whether a particular protein has chemotactic activity for a population of cells can be readily determined by employing such protein or peptide in any known assay for cell chemotaxis.

[0222] Therapeutic compositions of the invention can be used in the following:

[0223] Assays for chemotactic activity (which will identify proteins that induce or prevent chemotaxis) consist of assays that measure the ability of a protein to induce the migration of cells across a membrane as well as the ability of a protein to induce the adhesion of one cell population to another cell population. Suitable assays for movement and adhesion include, without limitation, those described in: Current Protocols in Immunology, Ed by J. E. Coligan, A. M. Kruisbeek, D. H. Marguiles, E. M. Shevach, W. Strober, Pub. Greene Publishing Associates and Wiley-Interscience (Chapter 6.12, Measurement of alpha and beta Chemokines 6.12.1-6.12.28; Taub et al. J. Clin. Invest. 95:1370-1376, 1995; Lind et al. APMIS 103:140-146, 1995; Muller et al Eur. J. Immunol. 25:1744-1748; Gruber et al. J. of Immunol. 152:5860-5867, 1994; Johnston et al. J. of Immunol. 153:1762-1768, 1994.

[0224] 4.10.10 Hemostatic and Thrombolytic Activity

[0225] A polypeptide of the invention may also be involved in hemostasis or thrombolysis or thrombosis. A polynucleotide of the invention can encode a polypeptide exhibiting such attributes. Compositions may be useful in treatment of various coagulation disorders (including hereditary disorders, such as hemophilias) or to enhance coagulation and other hemostatic events in treating wounds resulting from trauma, surgery or other causes. A composition of the invention may also be useful for dissolving or inhibiting formation of thromboses and for treatment and prevention of conditions resulting therefrom (such as, for example, infarction of cardiac and central nervous system vessels (e.g., stroke).

[0226] Therapeutic compositions of the invention can be used in the following:

[0227] Assay for hemostatic and thrombolytic activity include, without limitation, those described in: Linet et al., J. Clin. Pharmacol. 26:131-140, 1986; Burdick et al., Thrombosis Res. 45:413419, 1987; Humphrey et al., Fibrinolysis 5:71-79 (1991); Schaub, Prostaglandins 35:467-474, 1988.

[0228] 4.10.11 Cancer Diagnosis and Therapy

[0229] Polypeptides of the invention may be involved in cancer cell generation, proliferation or metastasis. Detection of the presence or amount of polynucleotides or polypeptides of the invention may be useful for the diagnosis and/or prognosis of one or more types of cancer. For example, the presence or increased expression of a polynucleotide/polypeptide of the invention may indicate a hereditary risk of cancer, a precancerous condition, or an ongoing malignancy. Conversely, a defect in the gene or absence of the polypeptide may be associated with a cancer condition. Identification of single nucleotide polymorphisms associated with cancer or a predisposition to cancer may also be useful for diagnosis or prognosis.

[0230] Cancer treatments promote tumor regression by inhibiting tumor cell proliferation, inhibiting angiogenesis (growth of new blood vessels that is necessary to support tumor growth) and/or prohibiting metastasis by reducing tumor cell motility or invasiveness. Therapeutic compositions of the invention may be effective in adult and pediatric oncology including in solid phase tumors/malignancies, locally advanced tumors, human soft tissue sarcomas, metastatic cancer, including lymphatic metastases, blood cell malignancies including multiple myeloma, acute and chronic leukemias, and lymphomas, head and neck cancers including mouth cancer, larynx cancer and thyroid cancer, lung cancers including small cell carcinoma and non-small cell cancers, breast cancers including small cell carcinoma and ductal carcinoma, gastrointestinal cancers including esophageal cancer, stomach cancer, colon cancer, colorectal cancer and polyps associated with colorectal neoplasia, pancreatic cancers, liver cancer, urologic cancers including bladder cancer and prostate cancer, malignancies of the female genital tract including ovarian carcinoma, uterine (including endometrial) cancers, and solid tumor in the ovarian follicle, kidney cancers including renal cell carcinoma, brain cancers including intrinsic brain tumors, neuroblastoma, astrocytic brain tumors, gliomas, metastatic tumor cell invasion in the central nervous system, bone cancers including osteomas, skin cancers including malignant melanoma, tumor progression of human skin keratinocytes, squamous cell carcinoma, basal cell carcinoma, hemangiopericytoma and Karposi's sarcoma.

[0231] Polypeptides, polynucleotides, or modulators of polypeptides of the invention (including inhibitors and stimulators of the biological activity of the polypeptide of the invention) may be administered to treat cancer. Therapeutic compositions can be administered in therapeutically effective dosages alone or in combination with adjuvant cancer therapy such as surgery, chemotherapy, radiotherapy, thermotherapy, and laser therapy, and may provide a beneficial effect, e.g. reducing tumor size, slowing rate of tumor growth, inhibiting metastasis, or otherwise improving overall clinical condition, without necessarily eradicating the cancer.

[0232] The composition can also be administered in therapeutically effective amounts as a portion of an anti-cancer cocktail. An anti-cancer cocktail is a mixture of the polypeptide or modulator of the invention with one or more anti-cancer drugs in addition to a pharmaceutically acceptable carrier for delivery. The use of anti-cancer cocktails as a cancer treatment is routine. Anti-cancer drugs that are well known in the art and can be used as a treatment in combination with the polypeptide or modulator of the invention include: Actinomycin D, Amioglutethimide, Asparaginase, Bleomycin, Busulfan, Carboplatin, Carmustine, Chlorambucil, Cisplatin (cis-DDP), Cyclophosphamide, Cytarabine HCl (Cytosine arabinoside), Dacarbazine, Dactinomycin, Daunorubicin HCl, Doxorubicin HCl, Estramustine phosphate sodium, Etoposide (V16-213), Floxuridine, 5-Fluorouracil (5-Fu), Flutamide, Hydroxyurea (hydroxycarbamide), Ifosfamide, Interferon Alpha-2a, Interferon Alpha-2b, Leuprolide acetate (LHRH-releasing factor analog), Lomustine, Mechlorethamine HCl (nitrogen mustard), Melphalan, Mercaptopurine, Mesna, Methotrexate (MTX), Mitomycin, Mitoxantrone HCl, Octreotide, Plicamycin, Procarbazine HCl, Streptozocin, Tamoxifen citrate, Thioguanine, Thiotepa, Vinblastine sulfate, Vincristine sulfate, Amsacrine, Azacitidine, Hexamethylmelamine, Interleukin-2, Mitoguazone, Pentostatin, Semustine, Teniposide, and Vindesine sulfate.

[0233] In addition, therapeutic compositions of the invention may be used for prophylactic treatment of cancer. There are hereditary conditions and/or environmental situations (e.g. exposure to carcinogens) known in the art that predispose an individual to developing cancers. Under these circumstances, it may be beneficial to treat these individuals with therapeutically effective doses of the polypeptide of the invention to reduce the risk of developing cancers.

[0234] In vitro models can be used to determine the effective doses of the polypeptide of the invention as a potential cancer treatment. These in vitro models include proliferation assays of cultured tumor cells, growth of cultured tumor cells in soft agar (see Freshney, (1987) Culture of Animal Cells: A Manual of Basic Technique, Wily-Liss, New York, N.Y. Ch 18 and Ch 21), tumor systems in nude mice as described in Giovanella et al., J. Natl. Can. Inst., 52: 921-30 (1974), mobility and invasive potential of tumor cells in Boyden Chamber assays as described in Pilkington et al., Anticancer Res., 17: 4107-9 (1997), and angiogenesis assays such as induction of vascularization of the chick chorioallantoic membrane or induction of vascular endothelial cell migration as described in Ribatta et al., Intl. J. Dev. Biol., 40: 1189-97 (1999) and Li et al., Clin. Exp. Metastasis, 17:423-9 (1999), respectively. Suitable tumor cells lines are available, e.g. from American Type Tissue Culture Collection catalogs.

[0235] 4.10.12 Receptor/Ligand Activity

[0236] A polypeptide of the present invention may also demonstrate activity as receptor, receptor ligand or inhibitor or agonist of receptor/ligand interactions. A polynucleotide of the invention can encode a polypeptide exhibiting such characteristics. Examples of such receptors and ligands include, without limitation, cytokine receptors and their ligands, receptor kinases and their ligands, receptor phosphatases and their ligands, receptors involved in cell-cell interactions and their ligands (including without limitation, cellular adhesion molecules (such as selectins, integrins and their ligands) and receptor/ligand pairs involved in antigen presentation, antigen recognition and development of cellular and humoral immune responses. Receptors and ligands are also useful for screening of potential peptide or small molecule inhibitors of the relevant receptor/ligand interaction. A protein of the present invention (including, without limitation, fragments of receptors and ligands) may themselves be useful as inhibitors of receptor/ligand interactions.

[0237] The activity of a polypeptide of the invention may, among other means, be measured by the following methods:

[0238] Suitable assays for receptor-ligand activity include without limitation those described in: Current Protocols in Immunology, Ed by J. E. Coligan, A. M. Kruisbeek, D. H. Margulies, E. M. Shevach, W. Strober, Pub. Greene Publishing Associates and Wiley-Interscience (Chapter 7.28, Measurement of Cellular Adhesion under static conditions 7.28.1-7.28.22), Takai et al., Proc. Natl. Acad. Sci. USA 84:6864-6868, 1987; Bierer et al., J. Exp. Med. 168:1145-1156, 1988; Rosenstein et al., J. Exp. Med. 169:149-160 1989; Stoltenborg et al., J. Immunol. Methods 175:59-68, 1994; Stitt et al., Cell 80:661-670, 1995.

[0239] By way of example, the polypeptides of the invention may be used as a receptor for a ligand(s) thereby transmitting the biological activity of that ligand(s). Ligands may be identified through binding assays, affinity chromatography, dihybrid screening assays, BIAcore assays, gel overlay assays, or other methods known in the art.

[0240] Studies characterizing drugs or proteins as agonist or antagonist or partial agonists or a partial antagonist require the use of other proteins as competing ligands. The polypeptides of the present invention or ligand(s) thereof may be labeled by being coupled to radioisotopes, colorimetric molecules or a toxin molecules by conventional methods. (“Guide to Protein Purification” Murray P. Deutscher (ed) Methods in Enzymology Vol. 182 (1990) Academic Press, Inc. San Diego). Examples of radioisotopes include, but are not limited to, tritium and carbon-14. Examples of colorimetric molecules include, but are not limited to, fluorescent molecules such as fluorescamine, or rhodamine or other colorimetric molecules. Examples of toxins include, but are not limited, to ricin.

[0241] 4.10.13 Drug Screening

[0242] This invention is particularly useful for screening chemical compounds by using the novel polypeptides or binding fragments thereof in any of a variety of drug screening techniques. The polypeptides or fragments employed in such a test may either be free in solution, affixed to a solid support, borne on a cell surface or located intracellularly. One method of drug screening utilizes eukaryotic or prokaryotic host cells which are stably transformed with recombinant nucleic acids expressing the polypeptide or a fragment thereof. Drugs are screened against such transformed cells in competitive binding assays. Such cells, either in viable or fixed form, can be used for standard binding assays. One may measure, for example, the formation of complexes between polypeptides of the invention or fragments and the agent being tested or examine the diminution in complex formation between the novel polypeptides and an appropriate cell line, which are well known in the art.

[0243] Sources for test compounds that may be screened for ability to bind to or modulate (i.e., increase or decrease) the activity of polypeptides of the invention include (1) inorganic and organic chemical libraries, (2) natural product libraries, and (3) combinatorial libraries comprised of either random or mimetic peptides, oligonucleotides or organic molecules.

[0244] Chemical libraries may be readily synthesized or purchased from a number of commercial sources, and may include structural analogs of known compounds or compounds that are identified as “hits” or “leads” via natural product screening.

[0245] The sources of natural product libraries are microorganisms (including bacteria and fungi), animals, plants or other vegetation, or marine organisms, and libraries of mixtures for screening may be created by: (1) fermentation and extraction of broths from soil, plant or marine microorganisms or (2) extraction of the organisms themselves. Natural product libraries include polyketides, non-ribosomal peptides, and (non-naturally occurring) variants thereof. For a review, see Science 282:63-68 (1998).

[0246] Combinatorial libraries are composed of large numbers of peptides, oligonucleotides or organic compounds and can be readily prepared by traditional automated synthesis methods, PCR, cloning or proprietary synthetic methods. Of particular interest are peptide and oligonucleotide combinatorial libraries. Still other libraries of interest include peptide, protein, peptidomimetic, multiparallel synthetic collection, recombinatorial, and polypeptide libraries. For a review of combinatorial chemistry and libraries created therefrom, see Myers, Curr. Opin. Biotechnol. 8:701-707 (1997). For reviews and examples of peptidomimetic libraries, see Al-Obeidi et al., Mol. Biotechnol, 9(3):205-23 (1998); Hruby et al., Curr Opin Chem Biol, 1(1):114-19 (1997); Dorner et al., Bioorg Med Chem, 4(5):709-15 (1996) (allylated dipeptides).

[0247] Identification of modulators through use of the various libraries described herein permits modification of the candidate “hit” (or “lead”) to optimize the capacity of the “hit” to bind a polypeptide of the invention. The molecules identified in the binding assay are then tested for antagonist or agonist activity in in vivo tissue culture or animal models that are well known in the art. In brief, the molecules are titrated into a plurality of cell cultures or animals and then tested for either cell/animal death or prolonged survival of the animal/cells.

[0248] The binding molecules thus identified may be complexed with toxins, e.g., ricin or cholera, or with other compounds that are toxic to cells such as radioisotopes. The toxin-binding molecule complex is then targeted to a tumor or other cell by the specificity of the binding molecule for a polypeptide of the invention. Alternatively, the binding molecules may be complexed with imaging agents for targeting and imaging purposes.

[0249] 4.10.14 Assay for Receptor Activity

[0250] The invention also provides methods to detect specific binding of a polypeptide e.g. a ligand or a receptor. The art provides numerous assays particularly useful for identifying previously unknown binding partners for receptor polypeptides of the invention. For example, expression cloning using mammalian or bacterial cells, or dihybrid screening assays can be used to identify polynucleotides encoding binding partners. As another example, affinity chromatography with the appropriate immobilized polypeptide of the invention can be used to isolate polypeptides that recognize and bind polypeptides of the invention. There are a number of different libraries used for the identification of compounds, and in particular small molecules, that modulate (i.e., increase or decrease) biological activity of a polypeptide of the invention. Ligands for receptor polypeptides of the invention can also be identified by adding exogenous ligands, or cocktails of ligands to two cells populations that are genetically identical except for the expression of the receptor of the invention: one cell population expresses the receptor of the invention whereas the other does not. The response of the two cell populations to the addition of ligands(s) are then compared. Alternatively, an expression library can be co-expressed with the polypeptide of the invention in cells and assayed for an autocrine response to identify potential ligand(s). As still another example, BIAcore assays, gel overlay assays, or other methods known in the art can be used to identify binding partner polypeptides, including, (1) organic and inorganic chemical libraries, (2) natural product libraries, and (3) combinatorial libraries comprised of random peptides, oligonucleotides or organic molecules.

[0251] The role of downstream intracellular signaling molecules in the signaling cascade of the polypeptide of the invention can be determined. For example, a chimeric protein in which the cytoplasmic domain of the polypeptide of the invention is fused to the extracellular portion of a protein, whose ligand has been identified, is produced in a host cell. The cell is then incubated with the ligand specific for the extracellular portion of the chimeric protein, thereby activating the chimeric receptor. Known downstream proteins involved in intracellular signaling can then be assayed for expected modifications i.e. phosphorylation. Other methods known to those in the art can also be used to identify signaling molecules involved in receptor activity.

[0252] 4.10.15 Anti-Inflammatory Activity

[0253] Compositions of the present invention may also exhibit anti-inflammatory activity. The anti-inflammatory activity may be achieved by providing a stimulus to cells involved in the inflammatory response, by inhibiting or promoting cell-cell interactions (such as, for example, cell adhesion), by inhibiting or promoting chemotaxis of cells involved in the inflammatory process, inhibiting or promoting cell extravasation, or by stimulating or suppressing production of other factors which more directly inhibit or promote an inflammatory response. Compositions with such activities can be used to treat inflammatory conditions including chronic or acute conditions), including without limitation intimation associated with infection (such as septic shock, sepsis or systemic inflammatory response syndrome (SIRS)), ischemia-reperfusion injury, endotoxin lethality, arthritis, complement-mediated hyperacute rejection, nephritis, cytokine or chemokine-induced lung injury, inflammatory bowel disease, Crohn's disease or resulting from over production of cytokines such as INF or IL-1. Compositions of the invention may also be useful to treat anaphylaxis and hypersensitivity to an antigenic substance or material. Compositions of this invention may be utilized to prevent or treat conditions such as, but not limited to, sepsis, acute pancreatitis, endotoxin shock, cytokine induced shock, rheumatoid arthritis, chronic inflammatory arthritis, pancreatic cell damage from diabetes mellitus type 1, graft versus host disease, inflammatory bowel disease, inflamation associated with pulmonary disease, other autoimmune disease or inflammatory disease, an antiproliferative agent such as for acute or chronic mylegenous leukemia or in the prevention of premature labor secondary to intrauterine infections.

[0254] 4.10.16 Leukemias

[0255] Leukemias and related disorders may be treated or prevented by administration of a therapeutic that promotes or inhibits function of the polynucleotides and/or polypeptides of the invention. Such leukemias and related disorders include but are not limited to acute leukemia, acute lymphocytic leukemia, acute myelocytic leukemia, myeloblastic, promyelocytic, myelomonocytic, monocytic, erythroleukemia, chronic leukemia, chronic myelocytic (granulocytic) leukemia and chronic lymphocytic leukemia (for a review of such disorders, see Fishman et al., 1985, Medicine, 2d Ed, J. B. Lippincott Co., Philadelphia).

[0256] 4.10.17 Nervous System Disorders

[0257] Nervous system disorders, involving cell types which can be tested for efficacy of intervention with compounds that modulate the activity of the polynucleotides and/or polypeptides of the invention, and which can be treated upon thus observing an indication of therapeutic utility, include but are not limited to nervous system injuries, and diseases or disorders which result in either a disconnection of axons, a diminution or degeneration of neurons, or demyelination. Nervous system lesions which may be treated in a patient (including human and non-human mammalian patients) according to the invention include but are not limited to the following lesions of either the central (including spinal cord, brain) or peripheral nervous systems:

[0258] (i) traumatic lesions, including lesions caused by physical injury or associated with surgery, for example, lesions which sever a portion of the nervous system, or compression injuries;

[0259] (ii) ischemic lesions, in which a lack of oxygen in a portion of the nervous system results in neuronal injury or death, including cerebral infarction or ischemia, or spinal cord infarction or ischemia;

[0260] (iii) infectious lesions, in which a portion of the nervous system is destroyed or injured as a result of infection, for example, by an abscess or associated with infection by human immunodeficiency virus, herpes zoster, or herpes simplex virus or with Lyme disease, tuberculosis, syphilis;

[0261] (iv) degenerative lesions, in which a portion of the nervous system is destroyed or injured as a result of a degenerative process including but not limited to degeneration associated with Parkinson's disease, Alzheimer's disease, Huntington's chorea, or amyotrophic lateral sclerosis;

[0262] (v) lesions associated with nutritional diseases or disorders, in which a portion of the nervous system is destroyed or injured by a nutritional disorder or disorder of metabolism including but not limited to, vitamin B12 deficiency, folic acid deficiency, Wernicke disease, tobacco-alcohol amblyopia, Marchiafava-Bignami disease primary degeneration of the corpus callosum), and alcoholic cerebellar degeneration;

[0263] (vi) neurological lesions associated with systemic diseases including but not limited to diabetes (diabetic neuropathy, Bell's palsy), systemic lupus erythematosus, carcinoma, or sarcoidosis;

[0264] (vii) lesions caused by toxic substances including alcohol, lead, or particular neurotoxins; and

[0265] (viii) demyelinated lesions in which a portion of the nervous system is destroyed or injured by a demyelinating disease including but not limited to multiple sclerosis, human immunodeficiency virus-associated myelopathy, transverse myelopathy or various etiologies, progressive multifocal leukoencephalopathy, and central pontine myelinolysis.

[0266] Therapeutics which are useful according to the invention for treatment of a nervous system disorder may be selected by testing for biological activity in promoting the survival or differentiation of neurons. For example, and not by way of limitation, therapeutics which elicit any of the following effects may be useful according to the invention:

[0267] (i) increased survival time of neurons in culture;

[0268] (ii) increased sprouting of neurons in culture or in vivo;

[0269] (iii) increased production of a neuron-associated molecule in culture or in vivo, e.g., choline acetyltransferase or acetylcholinesterase with respect to motor neurons; or

[0270] (iv) decreased symptoms of neuron dysfunction in vivo.

[0271] Such effects may be measured by any method known in the art. In preferred, non-limiting embodiments, increased survival of neurons may be measured by the method set forth in Arakawa et al. (1990, J. Neurosci. 10:3507-3515); increased sprouting of neurons may be detected by methods set forth in Pestronk et al. (1980, Exp. Neurol. 70:65-82) or Brown et al. (1981, Ann. Rev. Neurosci. 4:1742); increased production of neuron-associated molecules may be measured by bioassay, enzymatic assay, antibody binding, Northern blot assay, etc., depending on the molecule to be measured; and motor neuron dysfunction may be measured by assessing the physical manifestation of motor neuron disorder, e.g., weakness, motor neuron conduction velocity, or functional disability.

[0272] In specific embodiments, motor neuron disorders that may be treated according to the invention include but are not limited to disorders such as infarction, infection, exposure to toxin, trauma, surgical damage, degenerative disease or malignancy that may affect motor neurons as well as other components of the nervous system, as well as disorders that selectively affect neurons such as amyotrophic lateral sclerosis, and including but not limited to progressive spinal muscular atrophy, progressive bulbar palsy, primary lateral sclerosis, infantile and juvenile muscular atrophy, progressive bulbar paralysis of childhood (Fazio-Londe syndrome), poliomyelitis and the post polio syndrome, and Hereditary Motorsensory Neuropathy (Charcot-Marie-Tooth Disease).

[0273] 4.10.18 Other Activities

[0274] A polypeptide of the invention may also exhibit one or more of the following additional activities or effects: inhibiting the growth, infection or function of, or killing, infectious agents, including, without limitation, bacteria, viruses, fungi and other parasites; effecting (suppressing or enhancing) bodily characteristics, including, without limitation, height, weight, hair color, eye color, skin, fat to lean ratio or other tissue pigmentation, or organ or body part size or shape (such as, for example, breast augmentation or diminution, change in bone form or shape); effecting biorhythms or circadian cycles or rhythms; effecting the fertility of male or female subjects; effecting the metabolism, catabolism, anabolism, processing, utilization, storage or elimination of dietary fat, lipid, protein, carbohydrate, vitamins, minerals, co-factors or other nutritional factors or component(s); effecting behavioral characteristics, including, without limitation, appetite, libido, stress, cognition (including cognitive disorders), depression (including depressive disorders) and violent behaviors; providing analgesic effects or other pain reducing effects; promoting differentiation and growth of embryonic stem cells in lineages other than hematopoietic lineages; hormonal or endocrine activity; in the case of enzymes, correcting deficiencies of the enzyme and treating deficiency-related diseases; treatment of hyperproliferative disorders (such as, for example, psoriasis); immunoglobulin-like activity (such as, for example, the ability to bind antigens or complement); and the ability to act as an antigen in a vaccine composition to raise an immune response against such protein or another material or entity which is cross-reactive with such protein.

[0275] 4.10.19 Identification of Polymorphisms

[0276] The demonstration of polymorphisms makes possible the identification of such polymorphisms in human subjects and the pharmacogenetic use of this information for diagnosis and treatment. Such polymorphisms may be associated with, e.g., differential predisposition or susceptibility to various disease states (such as disorders involving inflammation or immune response) or a differential response to drug administration, and this genetic information can be used to tailor preventive or therapeutic treatment appropriately. For example, the existence of a polymorphism associated with a predisposition to inflammation or autoimmune disease makes possible the diagnosis of this condition in humans by identifying the presence of the polymorphism.

[0277] Polymorphisms can be identified in a variety of ways known in the art which all generally involve obtaining a sample from a patient, analyzing DNA from the sample, optionally involving isolation or amplification of the DNA, and identifying the presence of the polymorphism in the DNA. For example, PCR may be used to amplify an appropriate fragment of genomic DNA which may then be sequenced. Alternatively, the DNA may be subjected to allele-specific oligonucleotide hybridization (in which appropriate oligonucleotides are hybridized to the DNA under conditions permitting detection of a single base mismatch) or to a single nucleotide extension assay (in which an oligonucleotide that hybridizes immediately adjacent to the position of the polymorphism is extended with one or more labeled nucleotides). In addition, traditional restriction fragment length polymorphism analysis (using restriction enzymes that provide differential digestion of the genomic DNA depending on the presence or absence of the polymorphism) may be performed. Arrays with nucleotide sequences of the present invention can be used to detect polymorphisms. The array can comprise modified nucleotide sequences of the present invention in order to detect the nucleotide sequences of the present invention. In the alternative, any one of the nucleotide sequences of the present invention can be placed on the array to detect changes from those sequences.

[0278] Alternatively a polymorphism resulting in a change in the amino acid sequence could also be detected by detecting a corresponding change in amino acid sequence of the protein, e.g., by an antibody specific to the variant sequence.

[0279] 4.10.20 Arthritis and Inflammation

[0280] The immunosuppressive effects of the compositions of the invention against rheumatoid arthritis is determined in an experimental animal model system. The experimental model system is adjuvant induced arthritis in rats, and the protocol is described by J. Holoshitz, et at, 1983, Science, 219:56, or by B. Waksman et al., 1963, Int. Arch Allergy Appl. Immunol., 23:129. Induction of the disease can be caused by a single injection, generally intradermally, of a suspension of killed Mycobacterium tuberculosis in complete Freund's adjuvant (CFA). The route of injection can vary, but rats may be injected at the base of the tail with an adjuvant mixture. The polypeptide is administered in phosphate buffered solution (PBS) at a dose of about 1-5 mg/kg. The control consists of administering PBS only.

[0281] The procedure for testing the effects of the test compound would consist of intradermally injecting killed Mycobacterium tuberculosis in CFA followed by immediately administering the test compound and subsequent treatment every other day until day 24. At 14, 15, 18, 20, 22, and 24 days after injection of Mycobacterium CFA, an overall arthritis score may be obtained as described by J. Holoskitz above. An analysis of the data would reveal that the test compound would have a dramatic affect on the swelling of the joints as measured by a decrease of the arthritis score.

[0282] 4.11 Therapeutic Methods

[0283] The compositions (including polypeptide fragments, analogs, variants and antibodies or other binding partners or modulators including antisense polynucleotides) of the invention have numerous applications in a variety of therapeutic methods. Examples of therapeutic applications include, but are not limited to, those exemplified herein.

[0284] 4.11.1 Example

[0285] One embodiment of the invention is the administration of an effective amount of the polypeptides or other composition of the invention to individuals affected by a disease or disorder that can be modulated by regulating the peptides of the invention. While the mode of administration is not particularly important, parenteral administration is preferred. An exemplary mode of administration is to deliver an intravenous bolus. The dosage of the polypeptides or other composition of the invention will normally be determined by the prescribing physician. It is to be expected that the dosage will vary according to the age, weight, condition and response of the individual patient. Typically, the amount of polypeptide administered per dose will be in the range of about 0.01 μg/kg to 100 mg/kg of body weight, with the preferred dose being about 0.1 μg/kg to 10 mg/kg of patient body weight. For parenteral administration, polypeptides of the invention will be formulated in an injectable form combined with a pharmaceutically acceptable parenteral vehicle. Such vehicles are well known in the art and examples include water, saline, Ringer's solution, dextrose solution, and solutions consisting of small amounts of the human serum albumin. The vehicle may contain minor amounts of additives that maintain the isotonicity and stability of the polypeptide or other active ingredient. The preparation of such solutions is within the skill of the art.

[0286] 4.12 Pharmaceutical Formulations and Routes of Administration

[0287] A protein or other composition of the present invention (from whatever source derived, including without limitation from recombinant and non-recombinant sources and including antibodies and other binding partners of the polypeptides of the invention) may be administered to a patient in need, by itself, or in pharmaceutical compositions where it is mixed with suitable carriers or excipient(s) at doses to treat or ameliorate a variety of disorders. Such a composition may optionally contain (in addition to protein or other active ingredient and a carrier) diluents, fillers, salts, buffers, stabilizers, solubilizers, and other materials well known in the art. The term “pharmaceutically acceptable” means a non-toxic material that does not interfere with the effectiveness of the biological activity of the active ingredient(s). The characteristics of the carrier will depend on the route of administration. The pharmaceutical composition of the invention may also contain cytokines, lymphokines, or other hematopoietic factors such as M-CSF, GM-CSF, TNF, IL-1, IL-2, IL-3, IL-4, IL-5, IL-6, IL-7, IL-8, IL-9, IL-10, IL-11, IL-12, IL-13, IL-14, IL-15, IFN, TNF0, TNF1, TNF2, G-CSF, Meg-CSF, thrombopoietin, stem cell factor, and erythropoietin. In further compositions, proteins of the invention may be combined with other agents beneficial to the treatment of the disease or disorder in question. These agents include various growth factors such as epidermal growth factor (EGF), platelet-derived growth factor (PDGF), transforming growth factors (TGF-α and TGF-β), insulin-like growth factor (IGF), as well as cytokines described herein.

[0288] The pharmaceutical composition may further contain other agents which either enhance the activity of the protein or other active ingredient or complement its activity or use in treatment. Such additional factors and/or agents may be included in the pharmaceutical composition to produce a synergistic effect with protein or other active ingredient of the invention, or to minimize side effects. Conversely, protein or other active ingredient of the present invention may be included in formulations of the particular clotting factor, cytokine, lymphokine, other hematopoietic factor, thrombolytic or anti-thrombotic factor, or anti-inflammatory agent to minimize side effects of the clotting factor, cytokine, lymphokine, other hematopoietic factor, thrombolytic or anti-thrombotic factor, or anti-inflammatory agent (such as IL-1Ra, IL-1 Hy1, IL-1 Hy2, anti-TNF, corticosteroids, immunosuppressive agents). A protein of the present invention may be active in multimers (e.g., heterodimers or homodimers) or complexes with itself or other proteins. As a result, pharmaceutical compositions of the invention may comprise a protein of the invention in such multimeric or complexed form.

[0289] As an alternative to being included in a pharmaceutical composition of the invention including a first protein, a second protein or a therapeutic agent may be concurrently administered with the first protein (e.g., at the same time, or at differing times provided that therapeutic concentrations of the combination of agents is achieved at the treatment site). Techniques for formulation and administration of the compounds of the instant application may be found in “Remington's Pharmaceutical Sciences,” Mack Publishing Co., Easton, Pa., latest edition. A therapeutically effective dose further refers to that amount of the compound sufficient to result in amelioration of symptoms, e.g., treatment, healing, prevention or amelioration of the relevant medical condition, or an increase in rate of treatment, healing, prevention or amelioration of such conditions. When applied to an individual active ingredient, administered alone, a therapeutically effective dose refers to that ingredient alone. When applied to a combination, a therapeutically effective dose refers to combined amounts of the active ingredients that result in the therapeutic effect, whether administered in combination, serially or simultaneously.

[0290] In practicing the method of treatment or use of the present invention, a therapeutically effective amount of protein or other active ingredient of the present invention is administered to a mammal having a condition to be treated. Protein or other active ingredient of the present invention may be administered in accordance with the method of the invention either alone or in combination with other therapies such as treatments employing cytokines, lymphokines or other hematopoietic factors. When co-administered with one or more cytokines, lymphokines or other hematopoietic factors, protein or other active ingredient of the present invention may be administered either simultaneously with the cytokine(s), lymphokine(s), other hematopoietic factor(s), thrombolytic or anti-thrombotic factors, or sequentially. If administered sequentially, the attending physician will decide on the appropriate sequence of administering protein or other active ingredient of the present invention in combination with cytokine(s), lymphokine(s), other hematopoietic factor(s), thrombolytic or anti-thrombotic factors.

[0291] 4.12.1 Routes of Administration

[0292] Suitable routes of administration may, for example, include oral, rectal, transmucosal, or intestinal administration; parenteral delivery, including intramuscular, subcutaneous, intramedullary injections, as well as intrathecal, direct intraventricular, intravenous, intraperitoneal, intranasal, or intraocular injections. Administration of protein or other active ingredient of the present invention used in the pharmaceutical composition or to practice the method of the present invention can be carried out in a variety of conventional ways, such as oral ingestion, inhalation, topical application or cutaneous, subcutaneous, intraperitoneal, parenteral or intravenous injection. Intravenous administration to the patient is preferred.

[0293] Alternately, one may administer the compound in a local rather than systemic manner, for example, via injection of the compound directly into a arthritic joints or in fibrotic tissue, often in a depot or sustained release formulation. In order to prevent the scarring process frequently occurring as complication of glaucoma surgery, the compounds may be administered topically, for example, as eye drops. Furthermore, one may administer the drug in a targeted drug delivery system, for example, in a liposome coated with a specific antibody, targeting, for example, arthritic or fibrotic tissue. The liposomes will be targeted to and taken up selectively by the afflicted tissue.

[0294] The polypeptides of the invention are administered by any route that delivers an effective dosage to the desired site of action. The determination of a suitable route of administration and an effective dosage for a particular indication is within the level of skill in the art. Preferably for wound treatment, one administers the therapeutic compound directly to the site. Suitable dosage ranges for the polypeptides of the invention can be extrapolated from these dosages or from similar studies in appropriate animal models. Dosages can then be adjusted as necessary by the clinician to provide maximal therapeutic benefit.

[0295] 4.12.2 Compositions/Formulations

[0296] Pharmaceutical compositions for use in accordance with the present invention thus may be formulated in a conventional manner using one or more physiologically acceptable carriers comprising excipients and auxiliaries which facilitate processing of the active compounds into preparations which can be used pharmaceutically. These pharmaceutical compositions may be manufactured in a manner that is itself known, e.g., by means of conventional mixing, dissolving, granulating, dragee-making, levigating, emulsifying, encapsulating, entrapping or lyophilizing processes. Proper formulation is dependent upon the route of administration chosen. When a therapeutically effective amount of protein or other active ingredient of the present invention is administered orally, protein or other active ingredient of the present invention will be in the form of a tablet, capsule, powder, solution or elixir. When administered in tablet form, the pharmaceutical composition of the invention may additionally contain a solid carrier such as a gelatin or an adjuvant. The tablet, capsule, and powder contain from about 5 to 95% protein or other active ingredient of the present invention, and preferably from about 25 to 90% protein or other active ingredient of the present invention. When administered in liquid form, a liquid carrier such as water, petroleum, oils of animal or plant origin such as peanut oil, mineral oil, soybean oil, or sesame oil, or synthetic oils may be added. The liquid form of the pharmaceutical composition may further contain physiological saline solution, dextrose or other saccharide solution, or glycols such as ethylene glycol, propylene glycol or polyethylene glycol. When administered in liquid form, the pharmaceutical composition contains from about 0.5 to 90% by weight of protein or other active ingredient of the present invention, and preferably from about 1 to 50% protein or other active ingredient of the present invention.

[0297] When a therapeutically effective amount of protein or other active ingredient of the present invention is administered by intravenous, cutaneous or subcutaneous injection, protein or other active ingredient of the present invention will be in the form of a pyrogen-free, parenterally acceptable aqueous solution. The preparation of such parenterally acceptable protein or other active ingredient solutions, having due regard to pH, isotonicity, stability, and the like, is within the skill in the art. A preferred pharmaceutical composition for intravenous, cutaneous, or subcutaneous injection should contain, in addition to protein or other active ingredient of the present invention, an isotonic vehicle such as Sodium Chloride Injection, Ringer's Injection, Dextrose Injection, Dextrose and Sodium Chloride Injection, Lactated Ringer's Injection, or other vehicle as known in the art. The pharmaceutical composition of the present invention may also contain stabilizers, preservatives, buffers, antioxidants, or other additives known to those of skill in the art. For injection, the agents of the invention may be formulated in aqueous solutions, preferably in physiologically compatible buffers such as Hanks's solution, Ringer's solution, or physiological saline buffer. For transmucosal administration, penetrants appropriate to the barrier to be permeated are used in the formulation. Such penetrants are generally known in the art.

[0298] For oral administration, the compounds can be formulated readily by combining the active compounds with pharmaceutically acceptable carriers well known in the art Such carriers enable the compounds of the invention to be formulated as tablets, pills, dragees, capsules, liquids, gels, syrups, slurries, suspensions and the like, for oral ingestion by a patient to be treated. Pharmaceutical preparations for oral use can be obtained from a solid excipient, optionally grinding a resulting mixture, and processing the mixture of granules, after adding suitable auxiliaries, if desired, to obtain tablets or dragee cores. Suitable excipients are, in particular, fillers such as sugars, including lactose, sucrose, mannitol, or sorbitol; cellulose preparations such as, for example, maize starch, wheat starch, rice starch, potato starch, gelatin, gum tragacanth, methyl cellulose, hydroxypropylmethyl-cellulose, sodium carboxymethylcellulose, and/or polyvinylpyrrolidone (PVP). If desired, disintegrating agents may be added, such as the cross-linked polyvinyl pyrrolidone, agar, or alginic acid or a salt thereof such as sodium alginate. Dragee cores are provided with suitable coatings. For this purpose, concentrated sugar solutions may be used, which may optionally contain gum arabic, talc, polyvinyl pyrrolidone, carbopol gel, polyethylene glycol, and/or titanium dioxide, lacquer solutions, and suitable organic solvents or solvent mixtures. Dyestuffs or pigments may be added to the tablets or dragee coatings for identification or to characterize different combinations of active compound doses.

[0299] Pharmaceutical preparations which can be used orally include push-fit capsules made of gelatin, as well as soft, sealed capsules made of gelatin and a plasticizer, such as glycerol or sorbitol. The push-fit capsules can contain the active ingredients in admixture with filler such as lactose, binders such as starches, and/or lubricants such as talc or magnesium stearate and, optionally, stabilizers. In soft capsules, the active compounds may be dissolved or suspended in suitable liquids, such as fatty oils, liquid paraffin, or liquid polyethylene glycols. In addition, stabilizers may be added. All formulations for oral administration should be in dosages suitable for such administration. For buccal administration, the compositions may take the form of tablets or lozenges formulated in conventional manner.

[0300] For administration by inhalation, the compounds for use according to the present invention are conveniently delivered in the form of an aerosol spray presentation from pressurized packs or a nebuliser, with the use of a suitable propellant, e.g., dichlorodifluoromethane, trichlorofluoromethane, dichlorotetrafluoroethane, carbon dioxide or other suitable gas. In the case of a pressurized aerosol the dosage unit may be determined by providing a valve to deliver a metered amount. Capsules and cartridges of, e.g., gelatin for use in an inhaler or insufflator may be formulated containing a powder mix of the compound and a suitable powder base such as lactose or starch. The compounds may be formulated for parenteral administration by injection, e.g., by bolus injection or continuous infusion. Formulations for injection may be presented in unit dosage form, e.g., in ampules or in multi-dose containers, with an added preservative. The compositions may take such forms as suspensions, solutions or emulsions in oily or aqueous vehicles, and may contain formulatory agents such as suspending, stabilizing and/or dispersing agents.

[0301] Pharmaceutical formulations for parenteral administration include aqueous solutions of the active compounds in water-soluble form. Additionally, suspensions of the active compounds may be prepared as appropriate oily injection suspensions. Suitable lipophilic solvents or vehicles include fatty oils such as sesame oil, or synthetic fatty acid esters, such as ethyl oleate or triglycerides, or liposomes. Aqueous injection suspensions may contain substances which increase the viscosity of the suspension, such as sodium carboxymethyl cellulose, sorbitol, or dextran. Optionally, the suspension may also contain suitable stabilizers or agents which increase the solubility of the compounds to allow for the preparation of highly concentrated solutions. Alternatively, the active ingredient may be in powder form for constitution with a suitable vehicle, e.g., sterile pyrogen-free water, before use.

[0302] The compounds may also be formulated in rectal compositions such as suppositories or retention enemas, e.g., containing conventional suppository bases such as cocoa butter or other glycerides. In addition to the formulations described previously, the compounds may also be formulated as a depot preparation. Such long acting formulations may be administered by implantation (for example subcutaneously or intramuscularly) or by intramuscular injection. Thus, for example, the compounds may be formulated with suitable polymeric or hydrophobic materials (for example as an emulsion in an acceptable oil) or ion exchange resins, or as sparingly soluble derivatives, for example, as a sparingly soluble salt.

[0303] A pharmaceutical carrier for the hydrophobic compounds of the invention is a co-solvent system comprising benzyl alcohol, a nonpolar surfactant, a water-miscible organic polymer, and an aqueous phase. The co-solvent system may be the VPD co-solvent system. VPD is a solution of 3% w/v benzyl alcohol, 8% w/v of the nonpolar surfactant polysorbate 80, and 65% w/v polyethylene glycol 300, made up to volume in absolute ethanol. The VPD co-solvent system (VPD:5W) consists of VPD diluted 1:1 with a 5% dextrose in water solution. This co-solvent system dissolves hydrophobic compounds well, and itself produces low toxicity upon systemic administration. Naturally, the proportions of a co-solvent system may be varied considerably without destroying its solubility and toxicity characteristics. Furthermore, the identity of the co-solvent components may be varied: for example, other low-toxicity nonpolar surfactants may be used instead of polysorbate 80; the fraction size of polyethylene glycol may be varied; other biocompatible polymers may replace polyethylene glycol, e.g. polyvinyl pyrrolidone; and other sugars or polysaccharides may substitute for dextrose. Alternatively, other delivery systems for hydrophobic pharmaceutical compounds may be employed. Liposomes and emulsions are well known examples of delivery vehicles or carriers for hydrophobic drugs. Certain organic solvents such as dimethylsulfoxide also may be employed, although usually at the cost of greater toxicity. Additionally, the compounds may be delivered using a sustained-release system, such as semipermeable matrices of solid hydrophobic polymers containing the therapeutic agent. Various types of sustained-release materials have been established and are well known by those skilled in the art. Sustained-release capsules may, depending on their chemical nature, release the compounds for a few weeks up to over 100 days. Depending on the chemical nature and the biological stability of the therapeutic reagent, additional strategies for protein or other active ingredient stabilization may be employed.

[0304] The pharmaceutical compositions also may comprise suitable solid or gel phase carriers or excipients. Examples of such carriers or excipients include but are not limited to calcium carbonate, calcium phosphate, various sugars, starches, cellulose derivatives, gelatin, and polymers such as polyethylene glycols. Many of the active ingredients of the invention may be provided as salts with pharmaceutically compatible counter ions. Such pharmaceutically acceptable base addition salts are those salts which retain the biological effectiveness and properties of the free acids and which are obtained by reaction with inorganic or organic bases such as sodium hydroxide, magnesium hydroxide, ammonia, trialkylamine, dialkylamine, monoalkylamine, dibasic amino acids, sodium acetate, potassium benzoate, triethanol amine and the like.

[0305] The pharmaceutical composition of the invention may be in the form of a complex of the protein(s) or other active ingredient(s) of present invention along with protein or peptide antigens. The protein and/or peptide antigen will deliver a stimulatory signal to both B and T lymphocytes. B lymphocytes will respond to antigen through their surface immunoglobulin receptor. T lymphocytes will respond to antigen through the T cell receptor (TCR) following presentation of the antigen by MHC proteins. MHC and structurally related proteins including those encoded by class I and class II MHC genes on host cells will serve to present the peptide antigen(s) to T lymphocytes. The antigen components could also be supplied as purified MHC-peptide complexes alone or with co-stimulatory molecules that can directly signal T cells. Alternatively antibodies able to bind surface immunoglobulin and other molecules on B cells as well as antibodies able to bind the TCR and other molecules on T cells can be combined with the pharmaceutical composition of the invention.

[0306] The pharmaceutical composition of the invention may be in the form of a liposome in which protein of the present invention is combined, in addition to other pharmaceutically acceptable carriers, with amphipathic agents such as lipids which exist in aggregated form as micelles, insoluble monolayers, liquid crystals, or lamellar layers in aqueous solution. Suitable lipids for liposomal formulation include, without limitation, monoglycerides, diglycerides, sulfatides, lysolecithins, phospholipids, saponin, bile acids, and the like. Preparation of such liposomal formulations is within the level of skill in the art, as disclosed, for example, in U.S. Pat. Nos. 4,235,871; 4,501,728; 4,837,028; and 4,737,323, all of which are incorporated herein by reference.

[0307] The amount of protein or other active ingredient of the present invention in the pharmaceutical composition of the present invention will depend upon the nature and severity of the condition being treated, and on the nature of prior treatments which the patient has undergone. Ultimately, the attending physician will decide the amount of protein or other active ingredient of the present invention with which to treat each individual patient. Initially, the attending physician will administer low doses of protein or other active ingredient of the present invention and observe the patient's response. Larger doses of protein or other active ingredient of the present invention may be administered until the optimal therapeutic effect is obtained for the patient, and at that point the dosage is not increased further. It is contemplated that the various pharmaceutical compositions used to practice the method of the present invention should contain about 0.01 μg to about 100 mg (preferably about 0.1 μg to about 10 mg, more preferably about 0.1 μg to about 1 mg) of protein or other active ingredient of the present invention per kg body weight For compositions of the present invention which are useful for bone, cartilage, tendon or ligament regeneration, the therapeutic method includes administering the composition topically, systematically, or locally as an implant or device. When administered, the therapeutic composition for use in this invention is, of course, in a pyrogen-free, physiologically acceptable form. Further, the composition may desirably be encapsulated or injected in a viscous form for delivery to the site of bone, cartilage or tissue damage. Topical administration may be suitable for wound healing and tissue repair. Therapeutically useful agents other than a protein or other active ingredient of the invention which may also optionally be included in the composition as described above, may alternatively or additionally, be administered simultaneously or sequentially with the composition in the methods of the invention. Preferably for bone and/or cartilage formation, the composition would include a matrix capable of delivering the protein-containing or other active ingredient-containing composition to the site of bone and/or cartilage damage, providing a structure for the developing bone and cartilage and optimally capable of being resorbed into the body. Such matrices may be formed of materials presently in use for other implanted medical applications.

[0308] The choice of matrix material is based on biocompatibility, biodegradability, mechanical properties, cosmetic appearance and interface properties. The particular application of the compositions will define the appropriate formulation. Potential matrices for the compositions may be biodegradable and chemically defined calcium sulfate, tricalcium phosphate, hydroxyapatite, polylactic acid, polyglycolic acid and polyanhydrides. Other potential materials are biodegradable and biologically well-defined, such as bone or dermal collagen. Further matrices are comprised of pure proteins or extracellular matrix components. Other potential matrices are nonbiodegradable and chemically defined, such as sintered hydroxyapatite, bioglass, aluminates, or other ceramics. Matrices may be comprised of combinations of any of the above mentioned types of material, such as polylactic acid and hydroxyapatite or collagen and tricalcium phosphate. The bioceramics may be altered in composition, such as in calcium-aluminate-phosphate and processing to alter pore size, particle size, particle shape, and biodegradability. Presently preferred is a 50:50 (mole weight) copolymer of lactic acid and glycolic acid in the form of porous particles having diameters ranging from 150 to 800 microns. In some applications, it will be useful to utilize a sequestering agent, such as carboxymethyl cellulose or autologous blood clot, to prevent the protein compositions from disassociating from the matrix.

[0309] A preferred family of sequestering agents is cellulosic materials such as alkylcelluloses (including hydroxyalkylcelluloses), including methylcellulose, ethylcellulose, hydroxyethylcellulose, hydroxypropylcellulose, hydroxypropyl-methylcellulose, and carboxymethylcellulose, the most preferred being cationic salts of carboxymethylcellulose (CMC). Other preferred sequestering agents include hyaluronic acid, sodium alginate, poly(ethylene glycol), polyoxyethylene oxide, carboxyvinyl polymer and poly(vinyl alcohol). The amount of sequestering agent useful herein is 0.5-20 wt %, preferably 1-10 wt % based on total formulation weight, which represents the amount necessary to prevent desorption of the protein from the polymer matrix and to provide appropriate handling of the composition, yet not so much that the progenitor cells are prevented from infiltrating the matrix, thereby providing the protein the opportunity to assist the osteogenic activity of the progenitor cells. In further compositions, proteins or other active ingredients of the invention may be combined with other agents beneficial to the treatment of the bone and/or cartilage defect, wound, or tissue in question. These agents include various growth factors such as epidermal growth factor (EGF), platelet derived growth factor (PDGF), transforming growth factors (TGF-α and TGF-β), and insulin-like growth factor (IGF).

[0310] The therapeutic compositions are also presently valuable for veterinary applications. Particularly domestic animals and thoroughbred horses, in addition to humans, are desired patients for such treatment with proteins or other active ingredients of the present invention. The dosage regimen of a protein-containing pharmaceutical composition to be used in tissue regeneration will be determined by the attending physician considering various factors which modify the action of the proteins, e.g., amount of tissue weight desired to be formed, the site of damage, the condition of the damaged tissue, the size of a wound, type of damaged tissue (e.g., bone), the patient's age, sex, and diet, the severity of any infection, time of administration and other clinical factors. The dosage may vary with the type of matrix used in the reconstitution and with inclusion of other proteins in the pharmaceutical composition. For example, the addition of other known growth factors, such as IGF I (insulin like growth factor I), to the final composition, may also effect the dosage. Progress can be monitored by periodic assessment of tissue/bone growth and/or repair, for example, X-rays, histomorphometric determinations and tetracycline labeling.

[0311] Polynucleotides of the present invention can also be used for gene therapy. Such polynucleotides can be introduced either in vivo or ex vivo into cells for expression in a mammalian subject. Polynucleotides of the invention may also be administered by other known methods for introduction of nucleic acid into a cell or organism (including, without limitation, in the form of viral vectors or naked DNA). Cells may also be cultured ex vivo in the presence of proteins of the present invention in order to proliferate or to produce a desired effect on or activity in such cells. Treated cells can then be introduced in vivo for therapeutic purposes.

[0312] 4.123 Effective Dosage

[0313] Pharmaceutical compositions suitable for use in the present invention include compositions wherein the active ingredients are contained in an effective amount to achieve its intended purpose. More specifically, a therapeutically effective amount means an amount effective to prevent development of or to alleviate the existing symptoms of the subject being treated. Determination of the effective amount is well within the capability of those skilled in the art, especially in light of the detailed disclosure provided herein. For any compound used in the method of the invention, the therapeutically effective dose can be estimated initially from appropriate in vitro assays. For example, a dose can be formulated in animal models to achieve a circulating concentration range that can be used to more accurately determine useful doses in humans. For example, a dose can be formulated in animal models to achieve a circulating concentration range that includes the IC₅₀ as determined in cell culture (i.e., the concentration of the test compound which achieves a half-maximal inhibition of the protein's biological activity). Such information can be used to more accurately determine useful doses in humans.

[0314] A therapeutically effective dose refers to that amount of the compound that results in amelioration of symptoms or a prolongation of survival in a patient. Toxicity and therapeutic efficacy of such compounds can be determined by standard pharmaceutical procedures in cell cultures or experimental animals, e.g., for determining the LD₅₀ (the dose lethal to 50% of the population) and the ED₅₀ (the dose therapeutically effective in 50% of the population). The dose ratio between toxic and therapeutic effects is the therapeutic index and it can be expressed as the ratio between LD₅₀ and ED₅₀. Compounds which exhibit high therapeutic indices are preferred. The data obtained from these cell culture assays and animal studies can be used in formulating a range of dosage for use in human. The dosage of such compounds lies preferably within a range of circulating concentrations that include the ED₅₀ with little or no toxicity. The dosage may vary within this range depending upon the dosage form employed and the route of administration utilized. The exact formulation, route of administration and dosage can be chosen by the individual physician in view of the patient's condition. See, e.g., Fingl et al., 1975, in “The Pharmacological Basis of Therapeutics”, Ch. 1 p.1. Dosage amount and interval may be adjusted individually to provide plasma levels of the active moiety which are sufficient to maintain the desired effects, or minimal effective concentration (MEC). The MEC will vary for each compound but can be estimated from in vitro data. Dosages necessary to achieve the MEC will depend on individual characteristics and route of administration. However, HPLC assays or bioassays can be used to determine plasma concentrations.

[0315] Dosage intervals can also be determined using MEC value. Compounds should be administered using a regimen which maintains plasma levels above the MEC for 10-90% of the time, preferably between 30-90% and most preferably between 50-90%. In cases of local administration or selective uptake, the effective local concentration of the drug may not be related to plasma concentration.

[0316] An exemplary dosage regimen for polypeptides or other compositions of the invention will be in the range of about 0.01 μg/kg to 100 mg/kg of body weight daily, with the preferred dose being about 0.1 μg/kg to 25 mg/kg of patient body weight daily, varying in adults and children. Dosing may be once daily, or equivalent doses may be delivered at longer or shorter intervals.

[0317] The amount of composition administered will, of course, be dependent on the subject being treated, on the subject's age and weight, the severity of the affliction, the manner of administration and the judgment of the prescribing physician.

[0318] 4.12.4 Packaging

[0319] The compositions may, if desired, be presented in a pack or dispenser device which may contain one or more unit dosage forms containing the active ingredient. The pack may, for example, comprise metal or plastic foil, such as a blister pack. The pack or dispenser device may be accompanied by instructions for administration. Compositions comprising a compound of the invention formulated in a compatible pharmaceutical carrier may also be prepared, placed in an appropriate container, and labeled for treatment of an indicated condition.

[0320] 4.13 Antibodies

[0321] Also included in the invention are antibodies to proteins, or fragments of proteins of the invention. The term “antibody” as used herein refers to immunoglobulin molecules and immunologically active portions of immunoglobulin (Ig) molecules, i.e., molecules that contain an antigen binding site that specifically binds (immunoreacts with) an antigen. Such antibodies include, but are not limited to, polyclonal, monoclonal, chimeric, single chain, F_{ab}, F_{ab′} and F_{(ab′)2} fragments, and an F_{ab} expression library. In general, an antibody molecule obtained from humans relates to any of the classes IgG, IgM, IgA, IgE and IgD, which differ from one another by the nature of the heavy chain present in the molecule. Certain classes have subclasses as well, such as IgG₁, IgG₂, and others. Furthermore, in humans, the light chain may be a kappa chain or a lambda chain. Reference herein to antibodies includes a reference to all such classes, subclasses and types of human antibody species.

[0322] An isolated related protein of the invention may be intended to serve as an antigen, or a portion or fragment thereof, and additionally can be used as an immunogen to generate antibodies that immunospecifically bind the antigen, using standard techniques for polyclonal and monoclonal antibody preparation. The full-length protein can be used or, alternatively, the invention provides antigenic peptide fragments of the antigen for use as immunogens. An antigenic peptide fragment comprises at least 6 amino acid residues of the amino acid sequence of the full length protein, such as the amino acid sequences shown in SEQ ID NO: 44-86, or 130-172, and encompasses an epitope thereof such that an antibody raised against the peptide forms a specific immune complex with the full length protein or with any fragment that contains the epitope. Preferably, the antigenic peptide comprises at least 10 amino acid residues, or at least 15 amino acid residues, or at least 20 amino acid residues, or at least 30 amino acid residues. Preferred epitopes encompassed by the antigenic peptide are regions of the protein that are located on its surface; commonly these are hydrophilic regions.

[0323] In certain embodiments of the invention, at least one epitope encompassed by the antigenic peptide is a region of related protein that is located on the surface of the protein, e.g., a hydrophilic region. A hydrophobicity analysis of the human related protein sequence will indicate which regions of a related protein are particularly hydrophilic and, therefore, are likely to encode surface residues useful for targeting antibody production. As a means for targeting antibody production, hydropathy plots showing regions of hydrophilicity and hydrophobicity may be generated by any method well known in the art, including, for example, the Kyte Doolittle or the Hopp Woods methods, either with or without Fourier transformation. See, e.g., Hopp and Woods, 1981, Proc. Nat. Acad Sci. USA 78: 3824-3828; Kyte and Doolittle 1982, J. Mol. Biol. 157: 105-142, each of which is incorporated herein by reference in its entirety. Antibodies that are specific for one or more domains within an antigenic protein, or derivatives, fragments, analogs or homologs thereof, are also provided herein.

[0324] A protein of the invention, or a derivative, fragment, analog, homolog or ortholog thereof, may be utilized as an immunogen in the generation of antibodies that immunospecifically bind these protein components.

[0325] Various procedures known within the art may be used for the production of polyclonal or monoclonal antibodies directed against a protein of the invention, or against derivatives, fragments, analogs homologs or orthologs thereof (see, for example, Antibodies: A Laboratory Manual, Harlow E, and Lane D, 1988, Cold Spring Harbor Laboratory Press, Cold Spring Harbor, N.Y., incorporated herein by reference). Some of these antibodies are discussed below.

[0326] 4.13.1 Polyclonal Antibodies

[0327] For the production of polyclonal antibodies, various suitable host animals (e.g., rabbit, goat, mouse or other mammal) may be immunized by one or more injections with the native protein, a synthetic variant thereof, or a derivative of the foregoing. An appropriate immunogenic preparation can contain, for example, the naturally occurring immunogenic protein, a chemically synthesized polypeptide representing the immunogenic protein, or a recombinantly expressed immunogenic protein. Furthermore, the protein may be conjugated to a second protein known to be immunogenic in the mammal being immunized. Examples of such immunogenic proteins include but are not limited to keyhole limpet hemocyanin, serum albumin, bovine thyroglobulin, and soybean trypsin inhibitor. The preparation can further include an adjuvant. Various adjuvants used to increase the immunological response include, but are not limited to, Freund's (complete and incomplete), mineral gels (e.g., aluminum hydroxide), surface active substances (e.g., lysolecithin, pluronic polyols, polyanions, peptides, oil emulsions, dinitrophenol, etc.), adjuvants usable in humans such as Bacille Calmette-Guerin and Corynebacterium parvum, or similar immunostimulatory agents. Additional examples of adjuvants which can be employed include MPL-TDM adjuvant (monophosphoryl Lipid A, synthetic trehalose dicorynomycolate).

[0328] The polyclonal antibody molecules directed against the immunogenic protein can be isolated from the mammal (e.g., from the blood) and further purified by well known techniques, such as affinity chromatography using protein A or protein G, which provide primarily the IgG fraction of immune serum. Subsequently, or alternatively, the specific antigen which is the target of the immunoglobulin sought, or an epitope thereof, may be immobilized on a column to purify the immune specific antibody by immunoaffinity chromatography. Purification of immunoglobulins is discussed, for example, by D. Wilkinson (The Scientist, published by The Scientist, Inc., Philadelphia Pa., Vol. 14, No. 8 (Apr. 17, 2000), pp. 25-28).

[0329] 4.13.2 Monoclonal Antibodies

[0330] The term “monoclonal antibody” (MAb) or “monoclonal antibody composition”, as used herein, refers to a population of antibody molecules that contain only one molecular species of antibody molecule consisting of a unique light chain gene product and a unique heavy chain gene product. In particular, the complementarity determining regions (CDRs) of the monoclonal antibody are identical in all the molecules of the population. MAbs thus contain an antigen binding site capable of immunoreacting with a particular epitope of the antigen characterized by a unique binding affinity for it.

[0331] Monoclonal antibodies can be prepared using hybridoma methods, such as those described by Kohler and Milstein, Nature, 256:495 (1975). In a hybridoma method, a mouse, hamster, or other appropriate host animal, is typically immunized with an immunizing agent to elicit lymphocytes that produce or are capable of producing antibodies that will specifically bind to the immunizing agent. Alternatively, the lymphocytes can be immunized in vitro. The immunizing agent will typically include the protein antigen, a fragment thereof or a fusion protein thereof. Generally, either peripheral blood lymphocytes are used if cells of human origin are desired, or spleen cells or lymph node cells are used if non-human mammalian sources are desired. The lymphocytes are then fused with an immortalized cell line using a suitable fusing agent, such as polyethylene glycol, to form a hybridoma cell (Goding, Monoclonal Antibodies: Principles and Practice, Academic Press, (1986) pp. 59-103). Immortalized cell lines are usually transformed mammalian cells, particularly myeloma cells of rodent, bovine and human origin. Usually, rat or mouse myeloma cell lines are employed. The hybridoma cells can be cultured in a suitable culture medium that preferably contains one or more substances that inhibit the growth or survival of the unfused, immortalized cells. For example, if the parental cells lack the enzyme hypoxanthine guanine phosphoribosyl transferase (HGPRT or HPRT), the culture medium for the hybridomas typically will include hypoxanthine, aminopterin, and thymidine (“HAT medium”), which substances prevent the growth of HGPRT-deficient cells.

[0332] Preferred immortalized cell lines are those that fuse efficiently, support stable high level expression of antibody by the selected antibody-producing cells, and are sensitive to a medium such as HAT medium. More preferred immortalized cell lines are murine myeloma lines, which can be obtained, for instance, from the Salk Institute Cell Distribution Center, San Diego, Calif. and the American Type Culture Collection, Manassas, Va. Human myeloma and mouse-human heteromyeloma cell lines also have been described for the production of human monoclonal antibodies (Kozbor, J. Immunol., 133:3001 (1984); Brodeur et al., Monoclonal Antibody Production Techniques and Applications, Marcel Dekker, Inc., New York, (1987) pp. 51-63).

[0333] The culture medium in which the hybridoma cells are cultured can then be assayed for the presence of monoclonal antibodies directed against the antigen. Preferably, the binding specificity of monoclonal antibodies produced by the hybridoma cells is determined by immunoprecipitation or by an in vitro binding assay, such as radioimmunoassay (RIA) or enzyme-linked immunoabsorbent assay (ELISA). Such techniques and assays are known in the art. The binding affinity of the monoclonal antibody can, for example, be determined by the Scatchard analysis of Munson and Pollard, Anal. Biochem. 107:220 (1980). Preferably, antibodies having a high degree of specificity and a high binding affinity for the target antigen are isolated.

[0334] After the desired hybridoma cells are identified, the clones can be subcloned by limiting dilution procedures and grown by standard methods. Suitable culture media for this purpose include, for example, Dulbecco's Modified Eagle's Medium and RPMI-1640 medium. Alternatively, the hybridoma cells can be grown in vivo as ascites in a mammal. The monoclonal antibodies secreted by the subclones can be isolated or purified from the culture medium or ascites fluid by conventional immunoglobulin purification procedures such as, for example, protein A-Sepharose, hydroxylapatite chromatography, gel electrophoresis, dialysis, or affinity chromatography.

[0335] The monoclonal antibodies can also be made by recombinant DNA methods, such as those described in U.S. Pat. No. 4,816,567. DNA encoding the monoclonal antibodies of the invention can be readily isolated and sequenced using conventional procedures (e.g., by using oligonucleotide probes that are capable of binding specifically to genes encoding the heavy and light chains of murine antibodies). The hybridoma cells of the invention serve as a preferred source of such DNA. Once isolated, the DNA can be placed into expression vectors, which are then transfected into host cells such as simian COS cells, Chinese hamster ovary (CHO) cells, or myeloma cells that do not otherwise produce immunoglobulin protein, to obtain the synthesis of monoclonal antibodies in the recombinant host cells. The DNA also can be modified, for example, by substituting the coding sequence for human heavy and light chain constant domains in place of the homologous murine sequences (U.S. Pat. No. 4,816,567; Morrison, Nature 368 812-13 (1994)) or by covalently joining to the immunoglobulin coding sequence all or part of the coding sequence for a non-immunoglobulin polypeptide. Such a non-immunoglobulin polypeptide can be substituted for the constant domains of an antibody of the invention, or can be substituted for the variable domains of one antigen-combining site of an antibody of the invention to create a chimeric bivalent antibody.

[0336] 4.133 Humanized Antibodies

[0337] The antibodies directed against the protein antigens of the invention can further comprise humanized antibodies or human antibodies. These antibodies are suitable for administration to humans without engendering an immune response by the human against the administered immunoglobulin. Humanized forms of antibodies are chimeric immunoglobulins, immunoglobulin chains or fragments thereof (such as Fv, Fab, Fab′, F(ab′)₂ or other antigen-binding subsequences of antibodies) that are principally comprised of the sequence of a human immunoglobulin, and contain minimal sequence derived from a non-human immunoglobulin. Humanization can be performed following the method of Winter and co-workers (Jones et al., Nature, 321:522-525 (1986); Riechmann et al., Nature. 332:323-327 (1988); Verhoeyen et al., Science. 239:1534-1536 (1988)), by substituting rodent CDRs or CDR sequences for the corresponding sequences of a human antibody. (See also U.S. Pat. No. 5,225,539.) In some instances, Fv framework residues of the human immunoglobulin are replaced by corresponding non-human residues. Humanized antibodies can also comprise residues which are found neither in the recipient antibody nor in the imported CDR or framework sequences. In general, the humanized antibody will comprise substantially all of at least one, and typically two, variable domains, in which all or substantially all of the CDR regions correspond to those of a non-human immunoglobulin and all or substantially all of the framework regions are those of a human immunoglobulin consensus sequence. The humanized antibody optimally also will comprise at least a portion of an immunoglobulin constant region (Fc), typically that of a human immunoglobulin (Jones et al., 1986; Riechmann et al., 1988; and Presta, Curr. Op. Struct. Biol., 2:593-596 (1992)).

[0338] 4.13.4 Human Antibodies

[0339] Fully human antibodies relate to antibody molecules in which essentially the entire sequences of both the light chain and the heavy chain, including the CDRs, arise from human genes. Such antibodies are termed “human antibodies”, or “fully human antibodies” herein. Human monoclonal antibodies can be prepared by the trioma technique; the human B-cell hybridoma technique (see Kozbor, et al., 1983 Immunol Today 4: 72) and the EBV hybridoma technique to produce human monoclonal antibodies (see Cole, et al., 1985 In: MONOCLONAL ANTIBODIES AND CANCER THERAPY, Alan R. Liss, Inc., pp. 77-96). Hunan monoclonal antibodies may be utilized in the practice of the present invention and may be produced by using human hybridomas (see Cote, et al., 1983. Proc Natl Acad Sci USA 80: 2026-2030) or by transforming human B-cells with Epstein Barr Virus in vitro (see Cole, et al., 1985 In: MONOCLONAL ANTIBODIES AND CANCER THERAPY, Alan R. Liss, Inc., pp. 77-96).

[0340] In addition, human antibodies can also be produced using additional techniques, including phage display libraries (Hoogenboom and Winter, J. Mol. Biol., 227:381 (1991); Marks et al., J. Mol. Biol., 222:581 (1991)). Similarly, human antibodies can be made by introducing human immunoglobulin loci into transgenic animals, e.g., mice in which the endogenous immunoglobulin genes have been partially or completely inactivated. Upon challenge, human antibody production is observed, which closely resembles that seen in humans in all respects, including gene rearrangement, assembly, and antibody repertoire. This approach is described, for example, in U.S. Pat. Nos. 5,545,807; 5,545,806; 5,569,825; 5,625,126; 5,633,425; 5,661,016, and in Marks et al. (Bio/Technology 10, 779-783 (1992)); Lonberg et al. (Nature 368 856-859 (1994)); Morrison (Nature 368, 812-13 (1994)); Fishwild et al, (Nature Biotechnology 14, 845-51 (1996)); Neuberger (Nature Biotechnology A, 826 (1996)); and Lonberg and Huszar (Intern. Rev. Immunol. 13 65-93 (1995)).

[0341] Human antibodies may additionally be produced using transgenic nonhuman animals which are modified so as to produce fully human antibodies rather than the animal's endogenous antibodies in response to challenge by an antigen. (See PCT publication WO94/02602). The endogenous genes encoding the heavy and light immunoglobulin chains in the nonhuman host have been incapacitated, and active loci encoding human heavy and light chain immunoglobulins are inserted into the host's genome. The human genes are incorporated, for example, using yeast artificial chromosomes containing the requisite human DNA segments. An animal which provides all the desired modifications is then obtained as progeny by crossbreeding intermediate transgenic animals containing fewer than the full complement of the modifications. The preferred embodiment of such a nonhuman animal is a mouse, and is termed the Xenomouse™ as disclosed in PCT publications WO 96/33735 and WO 96/34096. This animal produces B cells which secrete fully human immunoglobulins. The antibodies can be obtained directly from the animal after immunization with an immunogen of interest, as, for example, a preparation of a polyclonal antibody, or alternatively from immortalized B cells derived from the animal, such as hybridomas producing monoclonal antibodies. Additionally, the genes encoding the immunoglobulins with human variable regions can be recovered and expressed to obtain the antibodies directly, or can be further modified to obtain analogs of antibodies such as, for example, single chain Fv molecules.

[0342] An example of a method of producing a nonhuman host, exemplified as a mouse, lacking expression of an endogenous immunoglobulin heavy chain is disclosed in U.S. Pat. No. 5,939,598. It can be obtained by a method including deleting the J segment genes from at least one endogenous heavy chain locus in an embryonic stem cell to prevent rearrangement of the locus and to prevent formation of a transcript of a rearranged immunoglobulin heavy chain locus, the deletion being effected by a targeting vector containing a gene encoding a selectable marker; and producing from the embryonic stem cell a transgenic mouse whose somatic and germ cells contain the gene encoding the selectable marker.

[0343] A method for producing an antibody of interest, such as a human antibody, is disclosed in U.S. Pat. No. 5,916,771. It includes introducing an expression vector that contains a nucleotide sequence encoding a heavy chain into one mammalian host cell in culture, introducing an expression vector containing a nucleotide sequence encoding a light chain into another mammalian host cell, and fusing the two cells to form a hybrid cell. The hybrid cell expresses an antibody containing the heavy chain and the light chain.

[0344] In a further improvement on this procedure, a method for identifying a clinically relevant epitope on an immunogen, and a correlative method for selecting an antibody that binds immunospecifically to the relevant epitope with high affinity, are disclosed in PCT publication WO 99/53049.

[0345] 4.13.5 F_{ab} Fragments and Single Chain Antibodies

[0346] According to the invention, techniques can be adapted for the production of single-chain antibodies specific to an antigenic protein of the invention (see e.g., U.S. Pat. No. 4,946,778). In addition, methods can be adapted for the construction of F_{ab} expression libraries (see e.g., Huse, et al., 1989 Science 246: 1275-1281) to allow rapid and effective identification of monoclonal F_{ab} fragments with the desired specificity for a protein or derivatives, fragments, analogs or homologs thereof Antibody fragments that contain the idiotypes to a protein antigen may be produced by techniques known in the art including, but not limited to: (i) an F_{(ab′)2} fragment produced by pepsin digestion of an antibody molecule; (ii) an F_{ab} fragment generated by reducing the disulfide bridges of an F_{(ab′)2} fragment; (iii) an F_{ab} fragment generated by the treatment of the antibody molecule with papain and a reducing agent and (iv) Fᵥ fragments.

[0347] 4.13.6 Bispecific Antibodies

[0348] Bispecific antibodies are monoclonal, preferably human or humanized, antibodies that have binding specificities for at least two different antigens. In the present case, one of the binding specificities is for an antigenic protein of the invention. The second binding target is any other antigen, and advantageously is a cell-surface protein or receptor or receptor subunit.

[0349] Methods for making bispecific antibodies are known in the art. Traditionally, the recombinant production of bispecific antibodies is based on the co-expression of two immunoglobulin heavy-chain/light-chain pairs, where the two heavy chains have different specificities (Milstein and Cuello, Nature, 305:537-539 (1983)). Because of the random assortment of immunoglobulin heavy and light chains, these hybridomas (quadromas) produce a potential mixture of ten different antibody molecules, of which only one has the correct bispecific structure. The purification of the correct molecule is usually accomplished by affinity chromatography steps. Similar procedures are disclosed in WO 93/08829, published May 13, 1993, and in Traunecker et al., 1991 EMBO J., 10:3655-3659.

[0350] Antibody variable domains with the desired binding specificities (antibody-antigen combining sites) can be fused to immunoglobulin constant domain sequences. The fusion preferably is with an immunoglobulin heavy-chain constant domain, comprising at least part of the hinge, CH2, and CH3 regions. It is preferred to have the first heavy-chain constant region (CHI) containing the site necessary for light-chain binding present in at least one of the fusions. DNAs encoding the immunoglobulin heavy-chain fusions and, if desired, the immunoglobulin light chain, are inserted into separate expression vectors, and are co-transfected into a suitable host organism. For further details of generating bispecific antibodies see, for example, Suresh et al., Methods in Enzymology. 121:210 (1986).

[0351] According to another approach described in WO 96/27011, the interface between a pair of antibody molecules can be engineered to maximize the percentage of heterodimers which are recovered from recombinant cell culture. The preferred interface comprises at least a part of the CH3 region of an antibody constant domain. In this method, one or more small amino acid side chains from the interface of the first antibody molecule are replaced with larger side chains (e.g. tyrosine or tryptophan). Compensatory “cavities” of identical or similar size to the large side chain(s) are created on the interface of the second antibody molecule by replacing large amino acid side chains with smaller ones (e.g. alanine or threonine). This provides a mechanism for increasing the yield of the heterodimer over other unwanted end-products such as homodimers.

[0352] Bispecific antibodies can be prepared as full length antibodies or antibody fragments (e.g. F(ab′)₂ bispecific antibodies). Techniques for generating bispecific antibodies from antibody fragments have been described in the literature. For example, bispecific antibodies can be prepared using chemical linkage. Brennan et al., Science 229:81 (1985) describe a procedure wherein intact antibodies are proteolytically cleaved to generate F(ab′)₂ fragments. These fragments are reduced in the presence of the dithiol complexing agent sodium arsenite to stabilize vicinal dithiols and prevent intermolecular disulfide formation. The Fab′ fragments generated are then converted to thionitrobenzoate (TNB) derivatives. One of the Fab′-TNB derivatives is then reconverted to the Fab′-thiol by reduction with mercaptoethylamine and is mixed with an equimolar amount of the other Fab′-TNB derivative to form the bispecific antibody. The bispecific antibodies produced can be used as agents for the selective immobilization of enzymes.

[0353] Additionally, Fab′ fragments can be directly recovered from E. coli and chemically coupled to form bispecific antibodies. Shalaby et al., J. Exp. Med. 175:217-225 (1992) describe the production of a fully humanized bispecific antibody F(ab′)₂ molecule. Each Fab′ fragment was separately secreted from E. coli and subjected to directed chemical coupling in vitro to form the bispecific antibody. The bispecific antibody thus formed was able to bind to cells overexpressing the ErbB2 receptor and normal human T cells, as well as trigger the lytic activity of human cytotoxic lymphocytes against human breast tumor targets.

[0354] Various techniques for making and isolating bispecific antibody fragments directly from recombinant cell culture have also been described. For example, bispecific antibodies have been produced using leucine zippers. Kostelny et al., J. Immunol. 148(5):1547-1553 (1992). The leucine zipper peptides from the Fos and Jun proteins were linked to the Fab′ portions of two different antibodies by gene fusion. The antibody homodimers were reduced at the hinge region to form monomers and then re-oxidized to form the antibody heterodimers. This method can also be utilized for the production of antibody homodimers. The “diabody” technology described by Hollinger et al., Proc. Natl. Acad. Sci. USA 90:6444-6448 (1993) has provided an alternative mechanism for making bispecific antibody fragments. The fragments comprise a heavy-chain variable domain (V_{H}) connected to a light-chain variable domain (V_{L}) by a linker which is too short to allow pairing between the two domains on the same chain. Accordingly, the V_{H} and V_{L} domains of one fragment are forced to pair with the complementary V_{L} and V_{H} domains of another fragment, thereby forming two antigen-binding sites. Another strategy for making bispecific antibody fragments by the use of single-chain Fv (sFv) dimers has also been reported. See, Gruber et al., J. Immunol. 152:5368 (1994).

[0355] Antibodies with more than two valencies are contemplated. For example, trispecific antibodies can be prepared. Tutt et al., J. Immunol. 147:60 (1991).

[0356] Exemplary bispecific antibodies can bind to two different epitopes, at least one of which originates in the protein antigen of the invention. Alternatively, an anti-antigenic arm of an immunoglobulin molecule can be combined with an arm which binds to a triggering molecule on a leukocyte such as a T-cell receptor molecule (e.g. CD2γ, CD3, CD28, or B7), or Fc receptors for IgG (FcγR), such as FcγRI (CD64), FcγRII (CD32) and FcγRIII (CD16) so as to focus cellular defense mechanisms to the cell expressing the particular antigen. Bispecific antibodies can also be used to direct cytotoxic agents to cells which express a particular antigen. These antibodies possess an antigen-binding arm and an arm which binds a cytotoxic agent or a radionuclide chelator, such as EOTUBE, DPTA, DOTA, or TETA. Another bispecific antibody of interest binds the protein antigen described herein and further binds tissue factor (TF).

[0357] 4.13.7 Heteroconjugate Antibodies

[0358] Heteroconjugate antibodies are also within the scope of the present invention. Heteroconjugate antibodies are composed of two covalently joined antibodies. Such antibodies have, for example, been proposed to target immune system cells to unwanted cells (U.S. Pat. No. 4,676,980), and for treatment of HIV infection (WO 91/00360; WO 92/200373; EP 03089). It is contemplated that the antibodies can be prepared in vitro using known methods in synthetic protein chemistry, including those involving crosslinking agents. For example, immunotoxins can be constructed using a disulfide exchange reaction or by forming a thioether bond. Examples of suitable reagents for this purpose include iminothiolate and methyl-4-mercaptobutyrimidate and those disclosed, for example, in U.S. Pat. No. 4,676,980.

[0359] 4.13.8 Effector Function Engineering

[0360] It can be desirable to modify the antibody of the invention with respect to effector function, so as to enhance, e.g., the effectiveness of the antibody in treating cancer. For example, cysteine residue(s) can be introduced into the Fc region, thereby allowing interchain disulfide bond formation in this region. The homodimeric antibody thus generated can have improved internalization capability and/or increased complement-mediated cell killing and antibody-dependent cellular cytotoxicity (ADCC). See Caron et al., J. Exp Med., 176: 1191-1195 (1992) and Shopes, J. Immunol., 148: 2918-2922 (1992). Homodimeric antibodies with enhanced anti-tumor activity can also be prepared using heterobifunctional cross-linkers as described in Wolff et al. Cancer Research, 53: 2560-2565 (1993). Alternatively, an antibody can be engineered that has dual Fc regions and can thereby have enhanced complement lysis and ADCC capabilities. See Stevenson et al., Anti-Cancer Drug Design, 3: 219-230 (1989).

[0361] 4.13.9 Immunoconjugates

[0362] The invention also pertains to immunoconjugates comprising an antibody conjugated to a cytotoxic agent such as a chemotherapeutic agent, toxin (e.g., an enzymatically active toxin of bacterial, fungal, plant, or animal origin, or fragments thereof), or a radioactive isotope (i.e., a radioconjugate).

[0363] Chemotherapeutic agents useful in the generation of such immunoconjugates have been described above. Enzymatically active toxins and fragments thereof that can be used include diphtheria A chain, nonbinding active fragments of diphtheria toxin, exotoxin A chain (from Pseudomonas aeruginosa), ricin A chain, abrin A chain, modeccin A chain, alpha-sarcin, Aleurites fordii proteins, dianthin proteins, tolaca americana proteins (PAPI, PAPII, and PAP-S), momordica charantia inhibitor, curcin, crotin, sapaonaria officinalis inhibitor, gelonin, mitogellin, restrictocin, phenomycin, enomycin, and the tricothecenes. A variety of radionuclides are available for the production of radioconjugated antibodies. Examples include ²¹²Bi, ¹³¹I, ¹³¹In, ⁹⁰Y, and ¹⁸⁶Re.

[0364] Conjugates of the antibody and cytotoxic agent are made using a variety of bifunctional protein-coupling agents such as N-succinimidyl-3-(2-pyridyldithiol) propionate (SPDP), iminothiolane (IT), bifunctional derivatives of imidoesters (such as dimethyl adipimidate HCL), active esters (such as disuccinimidyl suberate), aldehydes (such as glutareldehyde), bis-azido compounds (such as bis (p-azidobenzoyl) hexanediamine), bis-diazonium derivatives (such as bis-+diazoniumbenzoyl)-ethylenediamine), diisocyanates (such as tolyene 2,6-diisocyanate), and bis-active fluorine compounds (such as 1,5-difluoro-2,4-dinitrobenzene). For example, a ricin immunotoxin can be prepared as described in Vitetta et al., Science, 238: 1098 (1987). Carbon-14-labeled 1-isothiocyanatobenzyl-3-methyldiethylene triaminepentaacetic acid (MX-DTPA) is an exemplary chelating agent for conjugation of radionucleotide to the antibody. See WO94/11026.

[0365] In another embodiment, the antibody can be conjugated to a “receptor” (such as streptavidin) for utilization in tumor pretargeting wherein the antibody-receptor conjugate is administered to the patient, followed by removal of unbound conjugate from the circulation using a clearing agent and then administration of a “ligand” (e.g., avidin) that is in turn conjugated to a cytotoxic agent.

[0366] 4.14 Computer Readable Sequences

[0367] In one application of this embodiment, a nucleotide sequence of the present invention can be recorded on computer readable media. As used herein, “computer readable media” refers to any medium which can be read and accessed directly by a computer. Such media include, but are not limited to: magnetic storage media, such as floppy discs, hard disc storage medium, and magnetic tape; optical storage media such as CD-ROM; electrical storage media such as RAM and ROM; and hybrids of these categories such as magnetic/optical storage media. A skilled artisan can readily appreciate how any of the presently known computer readable mediums can be used to create a manufacture comprising computer readable medium having recorded thereon a nucleotide sequence of the present invention. As used herein, “recorded” refers to a process for storing information on computer readable medium. A skilled artisan can readily adopt any of the presently known methods for recording information on computer readable medium to generate manufactures comprising the nucleotide sequence information of the present invention.

[0368] A variety of data storage structures are available to a skilled artisan for creating a computer readable medium having recorded thereon a nucleotide sequence of the present invention. The choice of the data storage structure will generally be based on the means chosen to access the stored information. In addition, a variety of data processor programs and formats can be used to store the nucleotide sequence information of the present invention on computer readable medium. The sequence information can be represented in a word processing text file, formatted in commercially-available software such as WordPerfect and Microsoft Word, or represented in the form of an ASCII file, stored in a database application, such as DB2, Sybase, Oracle, or the like. A skilled artisan can readily adapt any number of data processor structuring formats (e.g. text file or database) in order to obtain computer readable medium having recorded thereon the nucleotide sequence information of the present invention.

[0369] By providing any of the nucleotide sequences SEQ ID NO: 1-43, or 87-129 or a representative fragment thereof; or a nucleotide sequence at least 95% identical to any of the nucleotide sequences of SEQ ID NO: 1-43, or 87-129 in computer readable form, a skilled artisan can routinely access the sequence information for a variety of purposes. Computer software is publicly available which allows a skilled artisan to access sequence information provided in a computer readable medium. The examples which follow demonstrate how software which implements the BLAST (Altschul et al., J. Mol. Biol. 215:403410 (1990)) and BLAZE (Brutlag et al., Comp. Chem. 17:203-207 (1993)) search algorithms on a Sybase system is used to identify open reading frames (ORFs) within a nucleic acid sequence. Such ORFs may be protein encoding fragments and may be useful in producing commercially important proteins such as enzymes used in fermentation reactions and in the production of commercially useful metabolites.

[0370] As used herein, “a computer-based system” refers to the hardware means, software means, and data storage means used to analyze the nucleotide sequence information of the present invention. The minimum hardware means of the computer-based systems of the present invention comprises a central processing unit (CPU), input means, output means, and data storage means. A skilled artisan can readily appreciate that any one of the currently available computer-based systems are suitable for use in the present invention. As stated above, the computer-based systems of the present invention comprise a data storage means having stored therein a nucleotide sequence of the present invention and the necessary hardware means and software means for supporting and implementing a search means. As used herein, “data storage means” refers to memory which can store nucleotide sequence information of the present invention, or a memory access means which can access manufactures having recorded thereon the nucleotide sequence information of the present invention.

[0371] As used herein, “search means” refers to one or more programs which are implemented on the computer-based system to compare a target sequence or target structural motif with the sequence information stored within the data storage means. Search means are used to identify fragments or regions of a known sequence which match a particular target sequence or target motif. A variety of known algorithms are disclosed publicly and a variety of commercially available software for conducting search means are and can be used in the computer-based systems of the present invention. Examples of such software includes, but is not limited to, Smith-Waterman, MacPattern (EMBL), BLASTN and BLASTA (NPOLYPEPTIDEIA). A skilled artisan can readily recognize that any one of the available algorithms or implementing software packages for conducting homology searches can be adapted for use in the present computer-based systems. As used herein, a “target sequence” can be any nucleic acid or amino acid sequence of six or more nucleotides or two or more amino acids. A skilled artisan can readily recognize that the longer a target sequence is, the less likely a target sequence will be present as a random occurrence in the database. The most preferred sequence length of a target sequence is from about 10 to 300 amino acids, more preferably from about 30 to 100 nucleotide residues. However, it is well recognized that searches for commercially important fragments, such as sequence fragments involved in gene expression and protein processing, may be of shorter length.

[0372] As used herein, “a target structural motif,” or “target motif,” refers to any rationally selected sequence or combination of sequences in which the sequence(s) are chosen based on a three-dimensional configuration which is formed upon the folding of the target motif. There are a variety of target motifs known in the art. Protein target motifs include, but are not limited to, enzyme active sites and signal sequences. Nucleic acid target motifs include, but are not limited to, promoter sequences, hairpin structures and inducible expression elements (protein binding sequences).

[0373] 4.15 Triple Helix Formation

[0374] In addition, the fragments of the present invention, as broadly described, can be used to control gene expression through triple helix formation or antisense DNA or RNA, both of which methods are based on the binding of a polynucleotide sequence to DNA or RNA. Polynucleotides suitable for use in these methods are preferably 20 to 40 bases in length and are designed to be complementary to a region of the gene involved in transcription (triple helix—see Lee et al., Nucl. Acids Res. 6:3073 (1979); Cooney et al., Science 15241:456 (1988); and Dervan et al., Science 251:1360 (1991)) or to the mRNA itself (antisense−Olmno, J. Neurochem. 56:560 (1991); Oligodeoxynucleotides as Antisense Inhibitors of Gene Expression, CRC Press, Boca Raton, Fla. (1988)). Triple helix-formation optimally results in a shut-off of RNA transcription from DNA, while antisense RNA hybridization blocks translation of an mRNA molecule into polypeptide. Both techniques have been demonstrated to be effective in model systems. Information contained in the sequences of the present invention is necessary for the design of an antisense or triple helix oligonucleotide.

[0375] 4.16 Diagnostic Assays and Kits

[0376] The present invention further provides methods to identify the presence or expression of one of the ORFs of the present invention, or homolog thereof, in a test sample, using a nucleic acid probe or antibodies of the present invention, optionally conjugated or otherwise associated with a suitable label.

[0377] In general, methods for detecting a polynucleotide of the invention can comprise contacting a sample with a compound that binds to and forms a complex with the polynucleotide for a period sufficient to form the complex, and detecting the complex, so that if a complex is detected, a polynucleotide of the invention is detected in the sample. Such methods can also comprise contacting a sample under stringent hybridization conditions with nucleic acid primers that anneal to a polynucleotide of the invention under such conditions, and amplifying annealed polynucleotides, so that if a polynucleotide is amplified, a polynucleotide of the invention is detected in the sample.

[0378] In general, methods for detecting a polypeptide of the invention can comprise contacting a sample with a compound that binds to and forms a complex with the polypeptide for a period sufficient to form the complex, and detecting the complex, so that if a complex is detected, a polypeptide of the invention is detected in the sample.

[0379] In detail, such methods comprise incubating a test sample with one or more of the antibodies or one or more of the nucleic acid probes of the present invention and assaying for binding of the nucleic acid probes or antibodies to components within the test sample.

[0380] Conditions for incubating a nucleic acid probe or antibody with a test sample vary. Incubation conditions depend on the format employed in the assay, the detection methods employed, and the type and nature of the nucleic acid probe or antibody used in the assay. One skilled in the art will recognize that any one of the commonly available hybridization, amplification or immunological assay formats can readily be adapted to employ the nucleic acid probes or antibodies of the present invention. Examples of such assays can be found in Chard, T., An Introduction to Radioimmunoassay and Related Techniques, Elsevier Science Publishers, Amsterdam, The Netherlands (1986); Bullock, G. R. et al., Techniques in Immunocytochemistry, Academic Press, Orlando, Fla. Vol. 1 (1982), Vol. 2 (1983), Vol. 3 (1985); Tijssen, P., Practice and Theory of immunoassays: Laboratory Techniques in Biochemistry and Molecular Biology, Elsevier Science Publishers, Amsterdam, The Netherlands (1985). The test samples of the present invention include cells, protein or membrane extracts of cells, or biological fluids such as sputum, blood, serum, plasma, or urine. The test sample used in the above-described method will vary based on the assay format, nature of the detection method and the tissues, cells or extracts used as the sample to be assayed. Methods for preparing protein extracts or membrane extracts of cells are well known in the art and can be readily be adapted in order to obtain a sample which is compatible with the system utilized.

[0381] In another embodiment of the present invention, kits are provided which contain the necessary reagents to carry out the assays of the present invention. Specifically, the invention provides a compartment kit to receive, in close confinement, one or more containers which comprises: (a) a first container comprising one of the probes or antibodies of the present invention; and (b) one or more other containers comprising one or more of the following: wash reagents, reagents capable of detecting presence of a bound probe or antibody.

[0382] In detail, a compartment kit includes any kit in which reagents are contained in separate containers Such containers include small glass containers, plastic containers or strips of plastic or paper. Such containers allows one to efficiently transfer reagents from one compartment to another compartment such that the samples and reagents are not cross-contaminated, and the agents or solutions of each container can be added in a quantitative fashion from one compartment to another. Such containers will include a container which will accept the test sample, a container which contains the antibodies used in the assay, containers which contain wash reagents (such as phosphate buffered saline, Tris-buffers, etc.), and containers which contain the reagents used to detect the bound antibody or probe. Types of detection reagents include labeled nucleic acid probes, labeled secondary antibodies, or in the alternative, if the primary antibody is labeled, the enzymatic, or antibody binding reagents which are capable of reacting with the labeled antibody. One skilled in the art will readily recognize that the disclosed probes and antibodies of the present invention can be readily incorporated into one of the established kit formats which are well known in the art.

[0383] 4.17 Medical Imaging

[0384] The novel polypeptides and binding partners of the invention are useful in medical imaging of sites expressing the molecules of the invention (e.g., where the polypeptide of the invention is involved in the immune response, for imaging sites of inflammation or infection). See, e.g., Kunkel et al., U.S. Pat. No. 5,413,778. Such methods involve chemical attachment of a labeling or imaging agent, administration of the labeled polypeptide to a subject in a pharmaceutically acceptable carrier, and imaging the labeled polypeptide in vivo at the target site.

[0385] 4.18 Screening Assays

[0386] Using the isolated proteins and polynucleotides of the invention, the present invention further provides methods of obtaining and identifying agents which bind to a polypeptide encoded by an ORF corresponding to any of the nucleotide sequences set forth in SEQ ID NO: 1-43, or 87-129, or bind to a specific domain of the polypeptide encoded by the nucleic acid. In detail, said method comprises the steps of:

[0387] (a) contacting an agent with an isolated protein encoded by an ORF of the present invention, or nucleic acid of the invention; and

[0388] (b) determining whether the agent binds to said protein or said nucleic acid.

[0389] In general, therefore, such methods for identifying compounds that bind to a polynucleotide of the invention can comprise contacting a compound with a polynucleotide of the invention for a time sufficient to form a polynucleotide/compound complex, and detecting the complex, so that if a polynucleotide/compound complex is detected, a compound that binds to a polynucleotide of the invention is identified.

[0390] Likewise, in general, therefore, such methods for identifying compounds that bind to a polypeptide of the invention can comprise contacting a compound with a polypeptide of the invention for a time sufficient to form a polypeptide/compound complex, and detecting the complex, so that if a polypeptide/compound complex is detected, a compound that binds to a polynucleotide of the invention is identified.

[0391] Methods for identifying compounds that bind to a polypeptide of the invention can also comprise contacting a compound with a polypeptide of the invention in a cell for a time sufficient to form a polypeptide/compound complex, wherein the complex drives expression of a receptor gene sequence in the cell, and detecting the complex by detecting reporter gene sequence expression, so that if a polypeptide/compound complex is detected, a compound that binds a polypeptide of the invention is identified.

[0392] Compounds identified via such methods can include compounds which modulate the activity of a polypeptide of the invention (that is, increase or decrease its activity, relative to activity observed in the absence of the compound). Alternatively, compounds identified via such methods can include compounds which modulate the expression of a polynucleotide of the invention (that is, increase or decrease expression relative to expression levels observed in the absence of the compound). Compounds, such as compounds identified via the methods of the invention, can be tested using standard assays well known to those of skill in the art for their ability to modulate activity/expression.

[0393] The agents screened in the above assay can be, but are not limited to, peptides, carbohydrates, vitamin derivatives, or other pharmaceutical agents. The agents can be selected and screened at random or rationally selected or designed using protein modeling techniques.

[0394] For random screening, agents such as peptides, carbohydrates, pharmaceutical agents and the like are selected at random and are assayed for their ability to bind to the protein encoded by the ORF of the present invention. Alternatively, agents may be rationally selected or designed. As used herein, an agent is said to be “rationally selected or designed” when the agent is chosen based on the configuration of the particular protein. For example, one skilled in the art can readily adapt currently available procedures to generate peptides, pharmaceutical agents and the like, capable of binding to a specific peptide sequence, in order to generate rationally designed antipeptide peptides, for example see Hurby et al., Application of Synthetic Peptides: Antisense Peptides,” In Synthetic Peptides, A User's Guide, W. H. Freeman, NY (1992), pp. 289-307, and Kaspczak et al., Biochemistry 28:9230-8 (1989), or pharmaceutical agents, or the like.

[0395] In addition to the foregoing, one class of agents of the present invention, as broadly described, can be used to control gene expression through binding to one of the ORFs or EMFs of the present invention. As described above, such agents can be randomly screened or rationally designed/selected. Targeting the ORF or EMF allows a skilled artisan to design sequence specific or element specific agents, modulating the expression of either a single ORF or multiple ORFs which rely on the same EMF for expression control. One class of DNA binding agents are agents which contain base residues which hybridize or form a triple helix formation by binding to DNA or RNA. Such agents can be based on the classic phosphodiester, ribonucleic acid backbone, or can be a variety of sulfhydryl or polymeric derivatives which have base attachment capacity.

[0396] Agents suitable for use in these methods preferably contain 20 to 40 bases and are designed to be complementary to a region of the gene involved in transcription (triple helix—see Lee et al., Nucl. Acids Res. 6:3073 (1979); Cooney et al., Science 241:456 (1988); and Dervan et al., Science 251:1360 (1991)) or to the mRNA itself (antisense—Okano, J. Neurochem. 56:560 (1991); Oligodeoxynucleotides as Antisense Inhibitors of Gene Expression, CRC Press, Boca Raton, Fla. (1988)). Triple helix-formation optimally results in a shut-off of RNA transcription from DNA, while antisense RNA hybridization blocks translation of an mRNA molecule into polypeptide. Both techniques have been demonstrated to be effective in model systems. Information contained in the sequences of the present invention is necessary for the design of an antisense or triple helix oligonucleotide and other DNA binding agents.

[0397] Agents which bind to a protein encoded by one of the ORFs of the present invention can be used as a diagnostic agent. Agents which bind to a protein encoded by one of the ORFs of the present invention can be formulated using known techniques to generate a pharmaceutical composition.

[0398] 4.19 Use of Nucleic Acids as Probes

[0399] Another aspect of the subject invention is to provide for polypeptide-specific nucleic acid hybridization probes capable of hybridizing with naturally occurring nucleotide sequences. The hybridization probes of the subject invention may be derived from any of the nucleotide sequences SEQ ID NO: 1-43, or 87-129. Because the corresponding gene is only expressed in a limited number of tissues, a hybridization probe derived from any of the nucleotide sequences SEQ ID NO: 1-43, or 87-129 can be used as an indicator of the presence of RNA of cell type of such a tissue in a sample.

[0400] Any suitable hybridization technique can be employed, such as, for example, in situ hybridization. PCR as described in U.S. Pat. Nos. 4,683,195 and 4,965,188 provides additional uses for oligonucleotides based upon the nucleotide sequences. Such probes used in PCR may be of recombinant origin, may be chemically synthesized, or a mixture of both. The probe will comprise a discrete nucleotide sequence for the detection of identical sequences or a degenerate pool of possible sequences for identification of closely related genomic sequences.

[0401] Other means for producing specific hybridization probes for nucleic acids include the cloning of nucleic acid sequences into vectors for the production of mRNA probes. Such vectors are known in the art and are commercially available and may be used to synthesize RNA probes in vitro by means of the addition of the appropriate RNA polymerase as 17 or SP6 RNA polymerase and the appropriate radioactively labeled nucleotides. The nucleotide sequences may be used to construct hybridization probes for mapping their respective genomic sequences. The nucleotide sequence provided herein may be mapped to a chromosome or specific regions of a chromosome using well known genetic and/or chromosomal mapping techniques. These techniques include in situ hybridization, linkage analysis against known chromosomal markers, hybridization screening with libraries or flow-sorted chromosomal preparations specific to known chromosomes, and the like. The technique of fluorescent in situ hybridization of chromosome spreads has been described, among other places, in Verma et al (1988) Human Chromosomes: A Manual of Basic Techniques, Pergamon Press, New York N.Y.

[0402] Fluorescent in situ hybridization of chromosomal preparations and other physical chromosome mapping techniques may be correlated with additional genetic map data. Examples of genetic map data can be found in the 1994 Genome Issue of Science (265:1981f). Correlation between the location of a nucleic acid on a physical chromosomal map and a specific disease (or predisposition to a specific disease) may help delimit the region of DNA associated with that genetic disease. The nucleotide sequences of the subject invention may be used to detect differences in gene sequences between normal, carrier or affected individuals.

[0403] 4.20 Preparation of Support Bound Oligonucleotides

[0404] Oligonucleotides, i.e., small nucleic acid segments, may be readily prepared by, for example, directly synthesizing the oligonucleotide by chemical means, as is commonly practiced using an automated oligonucleotide synthesizer.

[0405] Support bound oligonucleotides may be prepared by any of the methods known to those of skill in the art using any suitable support such as glass, polystyrene or Teflon. One strategy is to precisely spot oligonucleotides synthesized by standard synthesizers. Immobilization can be achieved using passive adsorption (Inouye & Hondo, (1990) J. Clin. Microbiol. 28(6) 1469-72); using UV light (Nagata et a., 1985; Dahlen et al., 1987; Morrissey & Collins, (1989) Mol. Cell Probes 3(2) 189-207) or by covalent binding of base modified DNA (Keller et a., 1988; 1989); all references being specifically incorporated herein.

[0406] Another strategy that may be employed is the use of the strong biotin-streptavidin interaction as a linker. For example, Broude et al. (1994) Proc. Natl. Acad. Sci. USA 91(8) 3072-6, describe the use of biotinylated probes, although these are duplex probes, that are immobilized on streptavidin-coated magnetic beads. Streptavidin-coated beads may be purchased from Dynal, Oslo. Of course, this same lining chemistry is applicable to coating any surface with streptavidin. Biotinylated probes may be purchased from various sources, such as, e.g., Operon Technologies (Alameda, Calif.).

[0407] Nunc Laboratories (Naperville, Ill.) is also selling suitable material that could be used. Nunc Laboratories have developed a method by which DNA can be covalently bound to the microwell surface termed Covalink NH. CovaLink NH is a polystyrene surface grafted with secondary amino groups (>NH) that serve as bridge-heads for further covalent coupling. CovaLink Modules may be purchased from Nunc Laboratories. DNA molecules may be bound to CovaLink exclusively at the 5′-end by a phosphoramidate bond, allowing immobilization of more than 1 pmol of DNA (Rasmussen et al., (1991) Anal. Biochem. 198(1) 13842).

[0408] The use of CovaLink NH strips for covalent binding of DNA molecules at the 5′-end has been described (Rasmussen et al., (1991). In this technology, a phosphoramidate bond is employed (Chu et al., (1983) Nucleic Acids Res. 11(8)6513-29). This is beneficial as immobilization using only a single covalent bond is preferred. The phosphoramidate bond joins the DNA to the CovaLink NH secondary amino groups that are positioned at the end of spacer arms covalently grafted onto the polystyrene surface through a 2 nm long spacer arm. To link an oligonucleotide to CovaLink NH via an phosphoramidate bond, the oligonucleotide terminus must have a 5′-end phosphate group. It is, perhaps, even possible for biotin to be covalently bound to CovaLink and then streptavidin used to bind the probes.

[0409] More specifically, the linkage method includes dissolving DNA in water (7.5 ng/μl) and denaturing for 10 min. at 95° C. and cooling on ice for 10 min. Ice-cold 0.1 M 1-methylimidazole, pH 7.0 (1-MeIm₇), is then added to a final concentration of 10 mM 1-MeIm₇. The single-stranded DNA solution is then dispensed into CovaLink NH strips (75 μl/well) standing on ice.

[0410] Carbodiimide 0.2 M l-ethyl-3-(3-dimethylaminopropyl)-carbodiimide (EDC), dissolved in 10 mM 1-MeIm₇, is made fresh and 25 μl added per well. The strips are incubated for 5 hours at 50° C. After incubation the strips are washed using, e.g., Nunc-Immuno Wash; first the wells are washed 3 times, then they are soaked with washing solution for 5 min., and finally they are washed 3 times (where in the washing solution is 0.4 N NaOH, 0.25% SDS heated to 50° C.).

[0411] It is contemplated that a further suitable method for use with the present invention is that described in PCT Patent Application WO 90/03382 (Southern & Maskos), incorporated herein by reference. This method of preparing an oligonucleotide bound to a support involves attaching a nucleoside 3′-reagent through the phosphate group by a covalent phosphodiester link to aliphatic hydroxyl groups carried by the support. The oligonucleotide is then synthesized on the supported nucleoside and protecting groups removed from the synthetic oligonucleotide chain under standard conditions that do not cleave the oligonucleotide from the support Suitable reagents include nucleoside phosphoramidite and nucleoside hydrogen phosphorate.

[0412] An on-chip strategy for the preparation of DNA probe for the preparation of DNA probe arrays may be employed. For example, addressable laser-activated photodeprotection may be employed in the chemical synthesis of oligonucleotides directly on a glass surface, as described by Fodor et al. (1991) Science 251(4995) 767-73, incorporated herein by reference. Probes may also be immobilized on nylon supports as described by Van Ness et al. (1991) Nucleic Acids Res. 19(12) 3345-50; or linked to Teflon using the method of Duncan & Cavalier (1988) Anal. Biochem. 169(1) 104-8; all references being specifically incorporated herein.

[0413] To link an oligonucleotide to a nylon support, as described by Van Ness et al. (1991), requires activation of the nylon surface via alkylation and selective activation of the 5′-amine of oligonucleotides with cyanuric chloride.

[0414] One particular way to prepare support bound oligonucleotides is to utilize the light-generated synthesis described by Pease et al., (1994) PNAS USA 91(11) 5022-6, incorporated herein by reference). These authors used current photolithographic techniques to generate arrays of immobilized oligonucleotide probes (DNA chips). These methods, in which light is used to direct the synthesis of oligonucleotide probes in high-density, miniaturized arrays, utilize photolabile 5′-protected N-acyl-deoxynucleoside phosphoramidites, surface linker chemistry and versatile combinatorial synthesis strategies. A matrix of 256 spatially defined oligonucleotide probes may be generated in this manner.

[0415] 4.21 Preparation of Nucleic Acid Fragments

[0416] The nucleic acids may be obtained from any appropriate source, such as cDNAs, genomic DNA, chromosomal DNA, microdissected chromosome bands, cosmid or YAC inserts, and RNA, including mRNA without any amplification steps. For example, Sambrook et al (1989) describes three protocols for the isolation of high molecular weight DNA from mammalian cells (p. 9.14-9.23).

[0417] DNA fragments may be prepared as clones in Ml 3, plasmid or lambda vectors and/or prepared directly from genomic DNA or cDNA by PCR or other amplification methods. Samples may be prepared or dispensed in multiwell plates. About 100-1000 ng of DNA samples may be prepared in 2-500 ml of final volume.

[0418] The nucleic acids would then be fragmented by any of the methods known to those of skill in the art including, for example, using restriction enzymes as described at 9.24-9.28 of Sambrook et al. (1989), shearing by ultrasound and NaOH treatment.

[0419] Low pressure shearing is also appropriate, as described by Schriefer et al. (1990) Nucleic Acids Res. 18(24) 7455-6, incorporated herein by reference). In this method, DNA samples are passed through a small French pressure cell at a variety of low to intermediate pressures. A lever device allows controlled application of low to intermediate pressures to the cell. The results of these studies indicate that low-pressure shearing is a useful alternative to sonic and enzymatic DNA fragmentation methods.

[0420] One particularly suitable way for fragmenting DNA is contemplated to be that using the two base recognition endonuclease, CviJI, described by Fitzgerald et al. (1992) Nucleic Acids Res. 20(14)3753-62. These authors described an approach for the rapid fragmentation and fractionation of DNA into particular sizes that they contemplated to be suitable for shotgun cloning and sequencing.

[0421] The restriction endonuclease CviJI normally cleaves the recognition sequence PuGCPy between the G and C to leave blunt ends. Atypical reaction conditions, which alter the specificity of this enzyme (CviJI**), yield a quasi-random distribution of DNA fragments form the small molecule pUC19 (2688 base pairs). Fitzgerald et al. (1992) quantitatively evaluated the randomness of this fragmentation strategy, using a CviJI** digest of pUC19 that was size fractionated by a rapid gel filtration method and directly ligated, without end repair, to a lac Z minus M13 cloning vector. Sequence analysis of 76 clones showed that CviJI** restricts pyGCPy and PuGCPu, in addition to PuGCPy sites, and that new sequence data is accumulated at a rate consistent with random fragmentation.

[0422] As reported in the literature, advantages of this approach compared to sonication and agarose gel fractionation include: smaller amounts of DNA are required (0.2-0.5 μg instead of 2-5 μg); and fewer steps are involved (no preligation, end repair, chemical extraction, or agarose gel electrophoresis and elution are needed

[0423] Irrespective of the manner in which the nucleic acid fragments are obtained or prepared, it is important to denature the DNA to give single stranded pieces available for hybridization. This is achieved by incubating the DNA solution for 2-5 minutes at 80-90° C. The solution is then cooled quickly to 2° C. to prevent renaturation of the DNA fragments before they are contacted with the chip. Phosphate groups must also be removed from genomic DNA by methods known in the art.

[0424] 4.22 Preparation of DNA Arrays

[0425] Arrays may be prepared by spotting DNA samples on a support such as a nylon membrane. Spotting may be performed by using arrays of metal pins (the positions of which correspond to an array of wells in a microtiter plate) to repeated by transfer of about 20 nl of a DNA solution to a nylon membrane. By offset printing, a density of dots higher than the density of the wells is achieved. One to 25 dots may be accommodated in 1 mm², depending on the type of label used. By avoiding spotting in some preselected number of rows and columns, separate subsets (subarrays) may be formed. Samples in one subarray may be the same genomic segment of DNA (or the same gene) from different individuals, or may be different, overlapped genomic clones. Each of the subarrays may represent replica spotting of the same samples. In one example, a selected gene segment may be amplified from 64 patients. For each patient, the amplified gene segment may be in one 96-well plate (all 96 wells containing the same sample). A plate for each of the 64 patients is prepared. By using a 96-pin device, all samples may be spotted on one 8×12 cm membrane. Subarrays may contain 64 samples, one from each patient Where the 96 subarrays are identical, the dot span may be 1 mm² and there may be a 1 mm space between subarrays.

[0426] Another approach is to use membranes or plates (available from NUNC, Naperville, Ill.) which may be partitioned by physical spacers e.g. a plastic grid molded over the membrane, the grid being similar to the sort of membrane applied to the bottom of multiwell plates, or hydrophobic strips. A fixed physical spacer is not preferred for imaging by exposure to flat phosphor-storage screens or x-ray films.

[0427] The present invention is illustrated in the following examples. Upon consideration of the present disclosure, one of skill in the art will appreciate that many other embodiments and variations may be made in the scope of the present invention. Accordingly, it is intended that the broader aspects of the present invention not be limited to the disclosure of the following examples. The present invention is not to be limited in scope by the exemplified embodiments which are intended as illustrations of single aspects of the invention, and compositions and methods which are functionally equivalent are within the scope of the invention. Indeed, numerous modifications and variations in the practice of the invention are expected to occur to those skilled in the art upon consideration of the present preferred embodiments. Consequently, the only limitations which should be placed upon the scope of the invention are those which appear in the appended claims.

[0428] All references cited within the body of the instant specification are hereby incorporated by reference in their entirety.

### 5. EXAMPLES

### 5.1 Example 1

[0429] Novel Nucleic Acid Sequences Obtained from Various Libraries

[0430] A plurality of novel nucleic acids were obtained from cDNA libraries prepared from various human tissues and in some cases isolated from a genomic library derived from human chromosome using standard PCR, SBH sequence signature analysis and Sanger sequencing techniques. The inserts of the library were amplified with PCR using primers specific for the vector sequences which flank the inserts. Clones from cDNA libraries were spotted on nylon membrane filters and screened with oligonucleotide probes (e.g., 7-mers) to obtain signature sequences. The clones were clustered into groups of similar or identical sequences. Representative clones were selected for sequencing.

[0431] In some cases, the 5′ sequence of the amplified inserts was then deduced using a typical Sanger sequencing protocol. PCR products were purified and subjected to fluorescent dye terminator cycle sequencing. Single pass gel sequencing was done using a 377 Applied Biosystems (ABI) sequencer to obtain the novel nucleic acid sequences. In some cases RACE (Rapid Amplification of cDNA Ends) was performed to further extend the sequence in the 5′ direction.

### 5.2 Example 2

[0432] Assemblage of Novel Nucleic Acids

[0433] The contigs or nucleic acids of the present invention, designated as SEQ ID NO: 87-129 were assembled using an EST sequence as a seed. Then a recursive algorithm was used to extend the seed EST into an extended assemblage, by pulling additional sequences from different databases (i.e., Hyseq's database containing EST sequences, dbEST version 115, gb pri 115, and UniGene version 103, and exons from public domain genomic sequences predicated by GenScan) that belong to this assemblage. The algorithm terminated when there was no additional sequences from the above databases that would extend the assemblage. Further, inclusion of component sequences into the assemblage was based on a BLASTN hit to the extending assemblage with BLAST score greater than 300 and percent identity greater than 95%.

[0434] Table 6 sets forth the novel predicted polypeptides (including proteins) encoded by the novel polynucleotides (SEQ ID NO: 87-129) of the present invention, and their corresponding translation start and stop nucleotide locations to each of SEQ ID NO: 87-129. Table 6 also indicates the method by which the polypeptide was predicted. Method A refers to a polypeptide obtained by using a software program called FASTY (available from http://fasta.bioch.virginia.edu) which selects a polypeptide based on a comparison of the translated novel polynucleotide to known polynucleotides (W. R. Pearson, Methods in Enzymology, 183:63-98 (1990), herein incorporated by reference). Method B refers to a polypeptide obtained by using a software program called GenScan for human/vertebrate sequences (available from Stanford University, Office of Technology Licensing) that predicts the polypeptide based on a probabilistic model of gene structure/compositional properties (C. Burge and S. Karlin, J. Mol. Biol., 268:78-94(1997), incorporated herein by reference). Method C refers to a polypeptide obtained by using a Hyseq proprietary software program that translates the novel polynucleotide and its complementary strand into six possible amino acid sequences (forward and reverse frames) and chooses the polypeptide with the longest open reading frame.

### 5.3 Example 3

[0435] Novel Nucleic Acids

[0436] Using PHRAP (Univ. of Washington) or CAP4 (Paracel), fill-length gene cDNA sequences and their corresponding protein sequences were generated from the assemblage. Any frame shifts and incorrect stop codons were corrected by hand editing. During editing, the sequence was checked using FASIXY algorithm against Genbank (i.e., dbEST version 118, gb pri 118, UniGene version 118, Genpept release 118). Other computer programs which may have been used in the editing process were phredPhrap and Consed ((University of Washington) and ed-ready, ed-ext and gc-zip-2 (Hyseq, Inc.)). The full-length nucleotide sequences are shown in the Sequence Listing as SEQ ID NO: 1-11. The corresponding polypeptide sequences are SEQ ID NO: 44-54.

[0437] Table 1 shows the various tissue sources of SEQ ID NO: 1-11.

[0438] The nearest neighbor results for SEQ ID NO: 1-11 were obtained by a BLASTP (version 2.0al 19 MP-WashU) search against Genpept release 122 and Geneseq release 200105 (Derwent), using BLAST algorithm. The nearest neighbor result showed the closest homologue for SEQ ID NO: 1-11 from Genpept. The translated amino acid sequences for which the nucleic acid sequence encodes are shown in the Sequence Listing. The homologs with identifiable functions for SEQ ID NO: 1-11 are shown in Table 2 below.

[0439] Using eMatrix software package (Stanford University, Stanford, Calif.) (Wu et al., J. Comp. Biol., Vol. 6 pp. 219-235 (1999) herein incorporated by reference), all the sequences were examined to determine whether they had identifiable signature regions. Table 3 shows the signature region found in the indicated polypeptide sequences, the description of the signature, the eMatrix p-value(s) and the position(s) of the signature within the polypeptide sequence.

[0440] Using the pFam software program (Sonnhammer et al., Nucleic Acids Res., Vol. 26(1) pp. 320-322 (1998) herein incorporated by reference) all the polypeptide sequences were examined for domains with homology to certain peptide domains. Table 4 shows the name of the domain found, the description, the p-value and the pFam score for the identified domain within the sequence.

[0441] The nucleotide sequence within the sequences that codes for signal peptide sequences and their cleavage sites can be determine from using Neural Network SignalP V. 1.1 program (from Center for Biological Sequence Analysis, The Technical University of Denmark). The process for identifying prokaryotic and eukaryotic signal peptides and their cleavage sites are also disclosed by Henrik Nielson, Jacob Engelbrecht, Soren Brunak, and Gunnar von Heijne in the publication “Identification of prokaryotic and eukaryotic signal peptides and prediction of their cleavage sites” Protein Engineering, Vol. 10, no. 1, pp. 1-6(1997), incorporated herein by reference. A maximum S score and a mean S score, as described in the Nielson et al, as reference, was obtained for the polypeptide sequences. Table 7 shows the position of the signal peptide in each of the polypeptides and the maximum score and mean score associated with that signal peptide

### 5.4 Example 4

[0442] Novel Nucleic Acids

[0443] Using PHRAP (Univ. of Washington) or CAP4 (Paracel), a full length gene cDNA sequence and its corresponding protein sequence were generated from the assemblage. Any frame shifts and incorrect stop codons were corrected by hand editing. During editing, the sequence was checked using FASTY and/or BLAST against Genbank (i.e. dbEST version 119, gb pri 119, UniGene version 119, Genpept release 119). Other computer programs which may have been used in the editing process were phredPhrap and Consed (University of Washington) and ed-ready, ed-ext and gc-zip-2 (Hyseq, Inc.). The full-length nucleotide, including splice variants resulting from these procedures are shown in the Sequence Listing as SEQ ID NO: 12-16. The corresponding polypeptide sequences are SEQ ID NO: 55-59.

[0444] Table 1 shows the various tissue sources of SEQ ID NO: 12-16.

[0445] The nearest neighbor results for SEQ ID NO: 12-16 were obtained by a BLASTP version 2.0al 19 MP-WashU search against Genpept release 122 and Geneseq release 200105 (Derwent), using BLAST algorithm. The nearest neighbor result showed the closest homologue for SEQ ID NO: 12-16 from Genpept. The homologs with identifiable functions for SEQ ID NO: 12-16 are shown in Table 2 below.

[0446] Using eMatrix software package (Stanford University, Stanford, Calif.) (Wu et al., J. Comp. Biol., Vol. 6 pp. 219-235 (1999) herein incorporated by reference), all the sequences were examined to determine whether they had identifiable signature regions. Table 3 shows the signature region found in the indicated polypeptide sequences, the description of the signature, the eMatrix p-value(s) and the position(s) of the signature within the polypeptide sequence.

[0447] Using the pFam software program (Sonnhammer et al., Nucleic Acids Res., Vol. 26(1) pp. 320-322 (1998) herein incorporated by reference) all the polypeptide sequences were examined for domains with homology to certain peptide domains. Table 4 shows the name of the domain found, the description, the p-value and the pFam score for the identified domain within the sequence.

[0448] The nucleotide sequence within the sequences that codes for signal peptide sequences and their cleavage sites can be determine from using Neural Network SignalP V1.1 program (from Center for Biological Sequence Analysis, The Technical University of Denmark). The process for identifying prokaryotic and eukaryotic signal peptides and their cleavage sites are also disclosed by Henrik Nielson, Jacob Engelbrecht, Soren Brunak, and Gunnar von Heijne in the publication “Identification of prokaryotic and eukaryotic signal peptides and prediction of their cleavage sites” Protein Engineering, Vol. 10, no. 1, pp. 1-6 (1997), incorporated herein by reference. A maximum S score and a mean S score, as described in the Nielson et al as reference, was obtained for the polypeptide sequences. Table 7 shows the position of the signal peptide in each of the polypeptides and the maximum score and mean score associated with that signal peptide.

### 5.5 Example 5

[0449] Novel Nucleic Acids

[0450] Using PHRAP (Univ. of Washington) or CAP4 (Paracel), a full-length gene cDNA sequence and its corresponding protein sequence were generated from the assemblage. Any frame shifts and incorrect stop codons were corrected by hand editing. During editing, the sequence was checked using FASTY and/or BLAST against Genbank (i.e., dbEST version 120, gb pri 120, UniGene version 120, Genpept release 120). Other computer programs which may have been used in the editing process were phredPhrap and Consed (University of Washington) and ed-ready, ed-ext and gc-zip-2 (Hyseq, Inc.). The full-length nucleotide, including splice variants resulting from these procedures are shown in the Sequence Listing as SEQ ID NO: 17-26. The corresponding polypeptide sequences are SEQ ID NO: 60-69.

[0451] Table 1 shows the various tissue sources of SEQ ID NO: 17-26.

[0452] The homology results for SEQ ID NO: 17-26 were obtained by a BLASTP version 2.0al 19 MP-WashU search against Genpept release 122 and Geneseq release 200105 (Derwent), using BLAST algorithm. The nearest neighbor result showed the homologs for SEQ ID NO: 17-26 from Genpept. The translated amino acid sequences for which the nucleic acid sequence encodes are shown in the Sequence Listing. The homologues with identifiable functions for SEQ ID NO: 17-26 are shown in Table 2 below.

[0453] Using eMatrix software package (Stanford University, Stanford, Calif.) (Wu et al., J. Comp. Biol., Vol. 6 pp. 219-235 (1999) herein incorporated by reference), all the sequences were examined to determine whether they had identifiable signature regions. Table 3 shows the signature region found in the indicated polypeptide sequences, the description of the signature, the eMatrix p-value(s) and the position(s) of the signature within the polypeptide sequence.

[0454] Using the pFam software program (Sonnhammer et al., Nucleic Acids Res., Vol. 26(1) pp. 320-322 (1998) herein incorporated by reference) all the polypeptide sequences were examined for domains with homology to certain peptide domains. Table 4 shows the name of the domain found, the description, the p-value and the pFam score for the identified domain within the sequence.

[0455] The nucleotide sequence within the sequences that codes for signal peptide sequences and their cleavage sites can be determine from using Neural Network SignalP V1.1 program (from Center for Biological Sequence Analysis, The Technical University of Denmark). The process for identifying prokaryotic and eukaryotic signal peptides and their cleavage sites are also disclosed by Henrik Nielson, Jacob Engelbrecht, Soren Brunak, and Gunnar von Heijne in the publication “Identification of prokaryotic and eukaryotic signal peptides and prediction of their cleavage sites” Protein Engineering, Vol. 10, no. 1, pp. 1-6 (1997), incorporated herein by reference. A maximum S score and a mean S score, as described in the Nielson et al as reference, was obtained for the polypeptide sequences. Table 7 shows the position of the signal peptide in each of the polypeptides and the maximum score and mean score associated with that signal peptide.

### 5.6 Example 6

[0456] Novel Nucleic Acids

[0457] Using PHRAP (Univ. of Washington) or CAP4 (Paracel), a full-length gene cDNA sequence and its corresponding protein sequence were generated from the assemblage. Any frame shifts and incorrect stop codons were corrected by hand editing. During editing, the sequence was checked using FASTY and/or BLAST against Genbank (i.e., dbEST version 121, gb pri 121, UniGene version 121, Genpept release 121). Other computer programs which may have been used in the editing process were phredPhrap and Consed (University of Washington) and ed-ready, ed-ext and gc-zip-2 (Hyseq, Inc.). The full-length nucleotide, including splice variants resulting from these procedures are shown in the Sequence Listing as SEQ ID NO: 2743. The corresponding amino acid sequences are SEQ ID NO: 70-86.

[0458] Table 1 shows the various tissue sources of SEQ ID NO: 27-43.

[0459] The homology results for SEQ ID NO: 2743 were obtained by a BLASTP version 2.0al 19 MP-WashU search against Genpept release 122 and Geneseq release 200105 (Derwent), using BLAST algorithm. The nearest neighbor result showed the homologs for SEQ ID NO: 2743 from Genpept. The translated amino acid sequences for which the nucleic acid sequence encodes are shown in the Sequence Listing. The homologues with identifiable functions for SEQ ID NO: 2743 are shown in Table 2 below.

[0460] Using eMatrix software package (Stanford University, Stanford, Calif.) (Wu et al., J. Comp. Biol., Vol. 6 pp. 219-235 (1999) herein incorporated by reference), all the sequences were examined to determine whether they had identifiable signature regions. Table 3 shows the signature region found in the indicated polypeptide sequences, the description of the signature, the eMatrix p-value(s) and the position(s) of the signature within the polypeptide sequence.

[0461] Using the pFam software program (Sonnhammer et al., Nucleic Acids Res., Vol. 26(1) pp. 320-322 (1998) herein incorporated by reference) all the polypeptide sequences were examined for domains with homology to certain peptide domains. Table 4 shows the name of the domain found, the description, the p-value and the pFam score for the identified domain within the sequence.

[0462] The nucleotide sequence within the sequences that codes for signal peptide sequences and their cleavage sites can be determine from using Neural Network SignalP V1.1 program (from Center for Biological Sequence Analysis, The Technical University of Denmark). The process for identifying prokaryotic and eukaryotic signal peptides and their cleavage sites are also disclosed by Henrik Nielson, Jacob Engelbrecht, Soren Brunak, and Gunnar von Heijne in the publication “Identification of prokaryotic and eukaryotic signal peptides and prediction of their cleavage sites” Protein Engineering, Vol. 10, no. 1, pp. 1-6 (1997), incorporated herein by reference. A maximum S score and a mean S score, as described in the Nielson et al as reference, was obtained for the polypeptide sequences. Table 7 shows the position of the signal peptide in each of the polypeptides and the maximum score and mean score associated with that signal peptide.

[0463] Table 5 is a correlation table of all of the sequences and SEQ ID Nos. Table 1

| | | Library | |
|---|---|---|---|
| Tissue origin | RNA Source | Name | SEQ ID NOS: |
| adult brain | GIBCO | ABD003 | 2 6 21-22 28 35 |
| adult brain | Clontech | ABR006 | 6 38 |
| adult brain | Clontech | ABR008 | 2 5-6 8 14 16 21-22 30-32 |
| adult brain | Invitrogen | ABT004 | 3 6 41 |
| cultured | Stratagene | ADP001 | 8 21-22 30 35 |
| preadipocytes | | | |
| adrenal gland | Clontech | ADR002 | 1 28 35 |
| adult heart | GIBCO | AHR001 | 6 8 29 36 |
| adult kidney | GIBCO | AKD001 | 2 8 18 28 36 41-43 |
| adult kidney | Invitrogen | AKT002 | 8 35 37 41-43 |
| adult lung | GIBCO | ALG001 | 6 8 37 |
| young liver | GIBCO | ALV001 | 5 7 9 |
| adult liver | Invitrogen | ALV002 | 2 21-22 41-43 |
| adult ovary | Invitrogen | AOV001 | 6-7 9 13 21-22 26-27 35-36 |
| | | | 41 |
| adult placenta | Invitrogen | APL002 | 8 41 |
| adult spleen | GIBCO | ASP001 | 12 21-22 35-36 42-43 |
| testis | GIBCO | ATS001 | 8 |
| bone marrow | Clontech | BMD001 | 2 8-9 36 |
| bone marrow | Clontech | BMD002 | 12 16 18 21-22 |
| colon | Invitrogen | CLN001 | 3-4 7 33 41 |
| adult cervix | BioChain | CVX001 | 2 24 28 41-43 |
| diaphragm | BioChain | DIA002 | 35 |
| endothelial | Stratagene | EDT001 | 7-9 12 35-36 |
| cells | | | |
| fetal brain | Clontech | FBR004 | 6 |
| fetal brain | Clontech | FBR006 | 1 4 8 16 18-19 31 34 |
| fetal brain | Invitrogen | FBT002 | 8 19 21-23 41 |
| fetal heart | Invitrogen | FHR001 | 7 28 36 |
| fetal kidney | Clontech | FKD001 | 35-36 |
| fetal kidney | Clontech | FKD002 | 13 21-22 |
| fetal kidney | Invitrogen | FKD007 | 15 |
| fetal lung | Invitrogen | FLG003 | 6 |
| fetal liver- | Columbia | FLS001 | 2 5 7-9 21-22 28 31 33 |
| spleen | University | | 36-38 41 |
| fetal liver- | Columbia | FLS002 | 1 7-8 12 18 21-22 28 35-36 |
| spleen | University | | 42-43 |
| fetal liver- | Columbia | FLS003 | 21-22 |
| spleen | University | | |
| fetal liver | Invitrogen | FLV001 | 36 41 |
| fetal liver | Clontech | FLV004 | 33 38 |
| fetal muscle | Invitrogen | FMS001 | 6 |
| fetal muscle | Invitrogen | FMS002 | 21-22 36 41 |
| fetal skin | Invitrogen | FSK001 | 1-2 6 12 26 28 38 40 |
| fetal skin | Invitrogen | FSK002 | 6 28 36 |
| umbilical | BioChain | FUC001 | 19 28 41 |
| cord | | | |
| fetal brain | GIBCO | HFB001 | 3 6 28 |
| infant brain | Columbia | IB2002 | 2 6 24 36 |
| | University | | |
| infant brain | Columbia | IB2003 | 6 20 28 33 |
| | University | | |
| infant brain | Columbia | IBM002 | 18 28 |
| | University | | |
| lung | Stratagene | LFB001 | 35 |
| fibroblast | | | |
| lung tumor | Invitrogen | LGT002 | 3 6 8-9 21-22 24 28 33 37 |
| | | | 42 |
| lymphocytes | ATCC | LPC001 | 16 21-22 27-28 38 |
| leukocyte | GIBCO | LUC001 | 3 6 8 12 16 35 |
| melanoma | Clontech | MEL004 | 5-6 29 |
| from cell line | | | |
| ATCC #CRL | | | |
| 1424 | | | |
| mammary | Invitrogen | MMG001 | 3-4 6 8 17 20-22 37 42-43 |
| gland | | | |
| induced | Stratagene | NTD001 | 25 |
| neuronal cells | | | |
| neuronal cells | Stratagene | NTU001 | 4 11 |
| placenta | Clontech | PLA003 | 31 |
| rectum | Invitrogen | REC001 | 8 24 42-43 |
| salivary gland | Clontech | SAL001 | 26 |
| small | Clontech | SIN001 | 28 41 |
| intestine | | | |
| skeletal | Clontech | SKM001 | 17 |
| muscle | | | |
| spinal cord | Clontech | SPC001 | 8 13 |
| adult spleen | Clontech | SPLc01 | 6 |
| Stomach | Clontech | STO001 | 12 |
| Thalamus | Clontech | THA002 | 6 12 |
| Thymus | Clonetech | THM001 | 41 |
| Thymus | Clontech | THMc02 | 1 12 31 39 |
| Thyroid gland | Clontech | THR001 | 1-2 7 18 28 35 |
| Trachea | Clontech | TRC001 | 6 16 18 |

[0464] TABLE 2

| SEQ | | | | Smith- | |
|---|---|---|---|---|---|
| ID | Accession | | | Waterman | % |
| NO: | Number | Species | Description | Score | Identity |
| 1 | AF182319 | Xenopus laevis | 4g2 | 194 | 38 |
| 2 | D11466 | Homo sapiens | PIG-A protein | 2519 | 100 |
| 3 | AC002505 | Arabidopsis | putative cyclin | 240 | 30 |
| | | thaliana | | | |
| 4 | AF159297 | Zea mays | extensin-like protein | 148 | 24 |
| 5 | Y28279 | Homo sapiens | Human G-protein coupled | 432 | 72 |
| | | | receptor GRIR-1. | | |
| 6 | AF124490 | Homo sapiens | ARF GTPase-activating protein | 2567 | 99 |
| | | | GIT1 | | |
| 7 | Y10529 | Homo sapiens | olfactory receptor | 969 | 71 |
| 8 | AF127837 | Hylobates lar | olfactory receptor | 1082 | 95 |
| 9 | Y10529 | Homo sapiens | olfactory receptor | 1393 | 100 |
| 10 | AF272362 | Homo sapiens | neuromedin U receptor 1 | 2240 | 99 |
| 11 | AF137396 | Homo sapiens | HOR 5′Beta14 | 1558 | 100 |
| 12 | AB023416 | Homo sapiens | apoptosis-associated speck-like | 990 | 100 |
| | | | protein containing a CARD | | |
| 13 | AF324241 | Homo sapiens | epsin 3 | 3302 | 99 |
| 14 | AF123880 | multiple | unknown protein U5/1 | 169 | 76 |
| | | sclerosis | | | |
| | | associated | | | |
| | | retrovirus | | | |
| | | element | | | |
| 15 | AJ224868 | Homo sapiens | GNAS1 | 2289 | 100 |
| 16 | W61170 | Homo sapiens | Partial polypeptide sequence | 520 | 100 |
| | | | from CP140 partial cDNA. | | |
| 17 | AL136365 | Homo sapiens | bA143M15.2 (novel DM DNA | 1715 | 100 |
| | | | binding domain containing | | |
| | | | protein) | | |
| 18 | AE003742 | Drosophila | CG13827 gene product | 189 | 28 |
| | | melanogaster | | | |
| 20 | AF231024 | Homo sapiens | protocadherin Flamingo 2 | 15953 | 100 |
| 21 | B38235 | Homo sapiens | Human secreted protein | 556 | 100 |
| | | | sequence encoded by gene 33 | | |
| | | | SEQ ID NO:91. | | |
| 22 | B38235 | Homo sapiens | Human secreted protein | 556 | 100 |
| | | | sequence encoded by gene 33 | | |
| | | | SEQ ID NO:91. | | |
| 23 | D29822 | Callithrix | Cytochrome P-450 | 267 | 70 |
| | | jacchus | | | |
| 24 | Z29331_cd1 | Homo sapiens | 11 JUN. 1998 Human receptor | 2189 | 99 |
| | | | tyrosine kinase cDNA. | | |
| 25 | Y36307 | Homo sapiens | Human secreted protein encoded | 1053 | 100 |
| | | | by gene 84. | | |
| 26 | AF242769 | Homo sapiens | mesenchymal stem cell protein | 1521 | 100 |
| | | | DSC54 | | |
| 27 | W87772 | Homo sapiens | Human serum glucocorticoid- | 138 | 26 |
| | | | regulated kinase (H-SGK2) | | |
| | | | polypeptide. | | |
| 28 | Y87259 | Homo sapiens | Human signal peptide containing | 2888 | 99 |
| | | | protein HSPP-36 SEQ ID | | |
| | | | NO:36. | | |
| 29 | Y95002 | Homo sapiens | Human secreted protein vc34_1, | 445 | 52 |
| | | | SEQ ID NO:44. | | |
| 30 | AJ007012 | Mus musculus | Fish protein | 795 | 69 |
| 31 | AF333769 | Homo sapiens | cell recognition molecule | 875 | 88 |
| | | | CASPR3 | | |
| 32 | AF302150 | Homo sapiens | phosphoinositol 3-phosphate- | 125 | 43 |
| | | | binding protein-2 | | |
| 33 | D42167 | Ciona | myoplasmin-C1 | 329 | 28 |
| | | intestinalis | | | |
| 34 | AJ296290 | Homo sapiens | putative protein kinase | 527 | 41 |
| 35 | M16342 | Homo sapiens | C protein | 1091 99 | |
| 36 | AF188700 | Homo sapiens | actin filament associated protein | 1417 | 46 |
| 37 | Y53032 | Homo sapiens | Human secreted protein clone | 908 | 100 |
| | | | di393_2 protein sequence SEQ | | |
| | | | ID NO:70. | | |
| 38 | Y53023 | Homo sapiens | Human secreted protein clone | 573 | 62 |
| | | | qf662_3 protein sequence SEQ | | |
| | | | ID NO:52. | | |
| 39 | M63510 | Rattus | uromodulin | 227 | 32 |
| | | norvegicus | | | |
| 40 | AE003744 | Drosophila | CG10252 gene product | 185 | 26 |
| | | melanogaster | | | |
| 41 | B43472 | Homo sapiens | Human cancer associated protein | 926 | 84 |
| | | | sequence SEQ ID NO:917. | | |
| 42 | AF237669 | Mus musculus | RalGDS-like protein 3 | 2786 | 77 |
| 43 | AF237669 | Mus musculus | RalGDS-like protein 3 | 2677 | 75 |

[0465] TABLE 3

| SEQ | | | |
|---|---|---|---|
| ID | Accession | | |
| NO: | Number | Description | Results* |
| 2 | PF00534 | Glycosyl | PF00534B 14.47 6.182e−15 312-336 |
| | | transferases | |
| | | group 1. | |
| 3 | PD02331 | CYCLIN | PD02331C 13.84 3.192e−09 128-155 |
| | | CELL CYCLE | |
| | | DIVISION | |
| | | PROTE. | |
| 5 | PR00245 | OLFACTORY | PR00245A 18.03 1.196e−17 140-162 |
| | | RECEPTOR | PR00245D 10.47 4.000e−15 266-278 |
| | | SIGNATURE | PR00245D 10.47 3.182e−12 192-204 |
| 7 | PR00245 | OLFACTORY | PR00245C 7.84 8.579e−19 205-221 |
| | | RECEPTOR | PR00245D 10.47 5.909e−14 241-253 |
| | | SIGNATURE | PR00245B 10.38 4.375e−13 144-159 |
| | | | PR00245A 18.03 3.000e−12 26-48 |
| | | | PR00245E 12.40 2.086e−09 258-273 |
| 8 | PR00245 | OLFACTORY | PR00245A 18.03 8.364e−21 100-122 |
| | | RECEPTOR | PR00245C 7.84 5.875e−18 279-295 |
| | | SIGNATURE | PR00245D 10.47 4.000e−15 315-327 |
| | | | PR00245E 12.40 8.941e−13 332-347 |
| | | | PR00245B 10.38 2.800e−11 218-233 |
| 9 | PR00245 | OLFACTORY | PR00245A 18.03 9.750e−20 26-48 |
| | | RECEPTOR | PR00245C 7.84 8.579e−19 205-221 |
| | | SIGNATURE | PR00245D 10.47 4.000e−15 241-253 |
| | | | PR00245B 10.38 4.405e−12 144-159 |
| | | | PR00245E 12.40 1.509e−10 258-273 |
| 10 | PR00527 | GASTRIN | PR00527D 12.23 2.694e−09 185-200 |
| | | RECEPTOR | |
| | | SIGNATURE | |
| 11 | PR00245 | OLFACTORY | PR00245A 18.03 3.204e−16 213-235 |
| | | RECEPTOR | PR00245C 7.84 8.759e−11 392-408 |
| | | SIGNATURE | |
| 13 | PD02563 | PROTEIN | PD02563A 19.30 9.800e−09 171-207 |
| | | NONSTRUC- | |
| | | TURAL | |
| | | C VP18. | |
| 15 | PF00992 | Troponin. | PF00992A 16.67 8.342e−09 331-366 |
| 16 | PR00019 | LEUCINE- | PR00019B 11.36 8.500e−11 146-160 |
| | | RICH | PR00019A 11.19 3.667e−09 149-163 |
| | | REPEAT | PR00019B 11.36 9.640e−09 124-138 |
| | | SIGNATURE | |
| 20 | BL00022 | EGF-like | BL00022B 7.54 3.250e−10 |
| | | domain | 1349-1356 |
| | | proteins. | |
| 21 | BL00972 | Ubiquitin | BL00972A 11.93 1.429e−14 42-60 |
| | | carboxyl- | BL00972D 22.55 5.750e−14 288-313 |
| | | terminal | |
| | | hydrolases | |
| | | family | |
| | | 2 proteins. | |
| 22 | BL00972 | Ubiquitin | BL00972A 11.93 1.429e−14 42-60 |
| | | carboxyl- | BL00972D 22.55 5.750e−14 288-313 |
| | | terminal | |
| | | hydrolases | |
| | | family | |
| | | 2 proteins. | |
| 24 | BL00790 | Receptor | BL00790O 7.68 4.316e−12 321-354 |
| | | tyrosine kinase | |
| | | class V | |
| | | proteins. | |
| 27 | PR00497 | NEUTROPHIL | PR00497A 6.92 4.273e−09 138-156 |
| | | CYTOSOL | |
| | | FACTOR P40 | |
| | | SIGNATURE | |
| 30 | PR00498 | NEUTROPHIL | PR00498E 13.75 7.785e−14 183-203 |
| | | CYTOSOL | PR00498C 8.33 5.500e−10 111-131 |
| | | FACTOR 1 | |
| | | SIGNATURE | |
| 31 | DM00516 | 186 | DM00516 30.53 7.465e−13 131-176 |
| | | DISCOIDIN I | |
| | | N- | |
| | | TERMINAL. | |
| 34 | BL00492 | Clusterin | BL00492E 12.52 5.394e−09 389-438 |
| | | proteins. | |
| 39 | PR00023 | ZONA | PR00023D 17.19 6.308e−11 102-118 |
| | | PELLUCIDA | |
| | | SPERM- | |
| | | BINDING | |
| | | PROTEIN | |
| | | SIGNATURE | |
| 42 | BL00720 | Guanine- | BL00720B 16.57 7.097e−17 344-368 |
| | | nucleotide | |
| | | dissociation | |
| | | stimulators | |
| | | CDC25 family | |
| | | sign. | |
| 43 | BL00720 | Guanine- | BL00720B 16.57 7.097e−17 344-368 |
| | | nucleotide | |
| | | dissociation | |
| | | stimulators | |
| | | CDC25 family | |
| | | sign. | |

*Results include in order: accession number subtype; raw score; p-value; position of signature in amino acid sequence

[0466] TABLE 4

| SEQ | | | | |
|---|---|---|---|---|
| ID | pFam | | | pFam |
| NO: | Name | Description | p-value | Score |
| 2 | Glycos_{—} | Glycosyl transferases group 1 | 6.8e−24 | 90.3 |
| | transf_1 | | | |
| 5 | 7tm_1 | 7 transmembrane receptor | 3.4e−19 | 63.1 |
| | | (rhodopsin family) | | |
| 7 | 7tm_1 | 7 transmembrane receptor | 5.4e−34 | 110.1 |
| | | (rhodopsin family | | |
| 8 | 7tm_1 | 7 transmembrane receptor | 2.3e−45 | 146.2 |
| | | (rhodopsin family) | | |
| 9 | 7tm_1 | 7 transmembrane receptor | 1.8e−41 | 133.9 |
| | | (rhodopsin family) | | |
| 10 | 7tm_1 | 7 transmembrane receptor | 9.2e−63 | 201.5 |
| | | (rhodopsin family) | | |
| 11 | 7tm_1 | 7 transmembrane receptor | 1.5e−16 | 54.8 |
| | | (rhodopsin family) | | |
| 12 | CARD | Caspase recruitment domain | 0.043 | 8.4 |
| 13 | ENTH | ENTH domain | 6.4e−63 | 222.5 |
| 15 | G-alpha | G-protein alpha subunit | 7.3e−05 | 21.3 |
| 16 | LRR | Leucine Rich Repeat | 3.3e−15 | 64.0 |
| 17 | DM- | DM DNA binding domain | 4.2e−25 | 96.8 |
| | domain | | | |
| 20 | cadherin | Cadherin domain | 9.2e−197 | 667.1 |
| 21 | UCH-1 | Ubiquitin carboxyl-terminal | 3.5e−10 | 47.3 |
| | | hydrolases family | | |
| 22 | UCH-1 | Ubiquitin carboxyl-terminal | 3.5e−10 | 47.3 |
| | | hydrolases family | | |
| 23 | p450 | Cytochrome P450 | 0.0014 | 15.4 |
| 24 | pkinase | Eukaryotic protein kinase domain | 8.6e−39 | 142.3 |
| 27 | PX | PX domain | 1.6e−06 | 35.1 |
| 30 | PX | PX domain | 4.2e−22 | 86.9 |
| 31 | F5_F8_{—} | F5/8 type C domain | 1.4e−29 | 111.7 |
| | type_C | | | |
| 32 | PH | PH domain | 4.1e−10 | 41.2 |
| 34 | pkinase | Eukaryotic protein kinase domain | 8.4e−05 | 21.2 |
| 36 | PH | PH domain | 3.2e−22 | 84.4 |
| 39 | zona_{—} | Zona pellucida-like domain | 6.9e−14 | 57.6 |
| | pellucida | | | |
| 42 | RasGEF | RasGEF domain | 1.2e−64 | 228.2 |
| 43 | RasGEF | RasGEF domain | 1.2e−64 | 228.2 |

[0467] TABLE 5

| SEQ ID | | | | | |
|---|---|---|---|---|---|
| NO: of | SEQ ID | SEQ ID | SEQ ID | Priority docket | |
| full- | NO: of | NO: of | NO: of | number_corre- | |
| length | full-length | contig | contig | sponding SEQ ID | |
| nucleotide | peptide | nucleotide | peptide | NO: in priority | SEQ ID NO: in |
| sequence | sequence | sequence | sequence | application | USSN 09/540,217 |
| 1 | 44 | 87 | 130 | 790CIP2A_1 | 1884 |
| 2 | 45 | 88 | 131 | 790CIP2A_2 | 5410, 22854, |
| | | | | | 22855, 22856 |
| 3 | 46 | 89 | 132 | 790CIP2A_3 | 11528 |
| 4 | 47 | 90 | 133 | 790CIP2A_4 | 14360, 14361, |
| | | | | | 14362 |
| 5 | 48 | 91 | 134 | 790CIP2A_5 | 16899, 16900, |
| | | | | | 16901 |
| 6 | 49 | 92 | 135 | 790CIP2A_8 | 21007, 21008, |
| | | | | | 21009, 21010 |
| 7 | 50 | 93 | 136 | 790CIP2A_9 | 26173, 26174, |
| | | | | | 26175, 26176, |
| | | | | | 26177, 26178 |
| 8 | 51 | 94 | 137 | 790CIP2A_10 | 27023, 27024, |
| | | | | | 27025 |
| 9 | 52 | 95 | 138 | 790CIP2A_11 | 27169, 27170, |
| | | | | | 27171, 27172, |
| | | | | | 27173, 27174 |
| 10 | 53 | 96 | 139 | 790CIP2A_12 | 28495 |
| 11 | 54 | 97 | 140 | 790CIP2A_13 | 28544 |
| 12 | 55 | 98 | 141 | 790CIP2B_1 | 1043, 1044, 1045 |
| 13 | 56 | 99 | 142 | 790CIP2B_2 | 1306 |
| 14 | 57 | 100 | 143 | 790CIP2B_4 | 11988, 11989, |
| | | | | | 11990 |
| 15 | 58 | 101 | 144 | 790CIP2B_5 | 19318, 19319, |
| | | | | | 19320 |
| 16 | 59 | 102 | 145 | 790CIP2B_6 | 27576, 27577 |
| 17 | 60 | 103 | 146 | 790CIP2C_1 | 6138 |
| 18 | 61 | 104 | 147 | 790CIP2C_2 | 6221 |
| 19 | 62 | 105 | 148 | 790CIP2C_3 | 8371 |
| 20 | 63 | 106 | 149 | 790CIP2C_4 | 11110, 11111, |
| | | | | | 11112 |
| 21 | 64 | 107 | 150 | 790CIP2C_5 | 15219, 15220, |
| | | | | | 15221 |
| 22 | 65 | 108 | 151 | 790CIP2C_6 | 15219, 15220, |
| | | | | | 15221 |
| 23 | 66 | 109 | 152 | 790CIP2C_7 | 16198, 16199, |
| | | | | | 16200, 16201 |
| 24 | 67 | 110 | 153 | 790CIP2C_8 | 16629, 16630 |
| 25 | 68 | 111 | 154 | 790CIP2C_9 | 21383 |
| 26 | 69 | 112 | 155 | 790CIP2C_10 | 23036 |
| 27 | 70 | 113 | 156 | 790CIP2D_1 | 1327, 1328, 1329, |
| | | | | | 1330, 1331 |
| 28 | 71 | 114 | 157 | 790CIP2D_2 | 1472, 1473, 1474 |
| 29 | 72 | 115 | 158 | 790CIP2D_3 | 1502 |
| 30 | 73 | 116 | 159 | 790CIP2D_4 | 2005, 2006 |
| 31 | 74 | 117 | 160 | 790CIP2D_5 | 3182, 3183 |
| 32 | 75 | 118 | 161 | 790CIP2D_6 | 3637, 3638, 3639 |
| 33 | 76 | 119 | 162 | 790CIP2D_7 | 5419, 5420 |
| 34 | 77 | 120 | 163 | 790CIP2D_8 | 11132 |
| 35 | 78 | 121 | 164 | 790CIP2D_9 | 11646, 11647 |
| 36 | 79 | 122 | 165 | 790CIP2D_10 | 13998, 13999 |
| 37 | 80 | 123 | 166 | 790CIP2D_11 | 19572 |
| 38 | 81 | 124 | 167 | 790CIP2D_12 | 21068, 21069 |
| 39 | 82 | 125 | 168 | 790CIP2D_13 | 23896, 23897 |
| 40 | 83 | 126 | 169 | 790CIP2D_14 | 26707 |
| 41 | 84 | 127 | 170 | 790CIP2D_15 | 27787, 27788, |
| | | | | | 27789 |
| 42 | 85 | 128 | 171 | 790CIP2D_16 | 29582, 29583, |
| | | | | | 29584, 29585 |
| 43 | 86 | 129 | 172 | 790CIP2D_17 | 29582, 29583, |
| | | | | | 29584, 29585 |

[0468] TABLE 6

| | | | | |
|---|---|---|---|---|
| | | Predicted | | |
| | | beginning | Predicted end | Amino acid sequence (A = Alanine C = Cysteine, D = Aspartic |
| | | nucleotide | nucleotide | Acid, E = Glutamic Acid, F = Phenylalanine, G = Glycine, |
| | | location corres- | location corres- | H−Histidine, I = soleucine, K = Lysine, L = Leucine, |
| | | ponding to first | ponding to last | M = Methionine, N = Asparagine, P = Proline, Q = Glutamine, |
| | | amino acid | amino acid | R = Arginine, S = Serine, T = Threonine, V = Valine, |
| SEQ | | residue of | residue of | W = Tryptophan, Y = Tyrosine, X = Unknown, * = Stop codon, |
| ID | | peptide | peptide | / = possible nucleotide deletion, \= possible nucleotide |
| NO: | Method | sequence | sequence | insertion |

| | | | | |
|---|---|---|---|---|
| 130 | B | 1 | 1344 | MGVQPLGKYSCSKWEKLAKTKGLQAPC |
| | | | | KSEIQWTIKSKSSKIISFDFMSHIQVKLMQ |
| | | | | NIGSHNLGQVCPCDFAGYCNSHLQVLGF |
| | | | | IPKKERKKKNDPIDEVKVRHQMDTMAFS |
| | | | | LTVPTLALKMPNGLDGMSLSPPGARVPL |
| | | | | HYLETELEDPFAFNEEDDDLKKGATVRK |
| | | | | KLQSKLAQNRQRQREThILKVRQEHFSPP |
| | | | | PAPSQQQPPQQHSIILSPLSTSLKPPAPPQ |
| | | | | GSVCKSPQPQNTSLPMQGVAPTTHTIAQ |
| | | | | ARQLSHKRPLPLLPSSRAPTVDPPRTDRIL |
| | | | | MKATAFSPHFSCISRLQRLVKLCTQKHQ |
| | | | | LDTDLFPHLGLDWSEESGEEPEDSEQASP |
| | | | | YQVAWSIRETLRYQRHASDDDDAESRSS |
| | | | | RVTQLCTYFQQKYKHLCRLERAESRQK |
| | | | | KCRHTFRKALLQAASKEPECTGQLIQEL |
| | | | | RRAACSRTRADEEVNVLLCDNL |
| 131 | A | 1 | 903 | MGGVESHIYQLPQCLIGRGDKVIIVIHAY |
| | | | | GNRKGIRYLTNDLKVYYLPLKVMYNQS |
| | | | | MAMTLFHSLPLLKYIFVQERVTIIHSHSSF |
| | | | | SAMAHDVLFHAKTMGLQTVLTDHPLSG |
| | | | | FAKVHSVLTNKLLTVSLCDTSRIICVSYT |
| | | | | SKENTVLRAALITEIVSVIPNAVDPIDFTP |
| | | | | DPFRRHDSITIVVSRLVYRKGTNLVSGTD |
| | | | | ITVDSAEKIPSIIKFSVKAFVFSEQNVRGVP |
| | | | | SQNQLLPCPFNVWFGEDLPLSPRSPLTPR |
| | | | | HGPGLANVCQYDEWIAVRHEATLLPMQ |
| | | | | EDLSIWLSGLLGEA |
| 132 | A | 1 | 849 | MEAPEGGGGGPAARGPEGQPAPEARVH |
| | | | | FRVARFIMEAGVKLGMRSIPIATACTIYH |
| | | | | KFFCNTNLDAYDPYLIAVSSIYLAGKAEK |
| | | | | QHLRTHDIINVSNRYFNPSGEPLELESRF |
| | | | | WELRDSIVQCELLMLRVLRFQVSFQLPH |
| | | | | KYLLHYLVSLENSLNRHSWQRTPVAVT |
| | | | | AWALLRDSYHGGLCLRFQAQHIAVAVL |
| | | | | YLALQVYGVEVPAEVKAEKPLGGRCLM |
| | | | | TTLPSQSLIILCLISFRFIPWTQRSPKVLAQ |
| | | | | ACPKRSPGWSAAWGHCQHVGMTGWSP |
| | | | | QDP |
| 133 | A | 3 | 1869 | ITTVAPSRPASSDCESDGS*EQDAGPGSR |
| | | | | MGPEK*AGPRPTRRVGRWSQTHSQTDD |
| | | | | TSGAVVPEYPSDR*YAGGRGPG/PGGPTV |
| | | | | HP*KRRS*NPQETKMMARRDPKSWAKR |
| | | | | LSPV*PRLAALLTSASPSCPLEPRVLPFRV |
| | | | | PPSHGLCEGTSYPNSPGT*RPPCRSSAKT |
| | | | | AGPLATRPEVPGAP*SAGRQPWFQRPWG |
| | | | | KRKG\GKPETMEAPG*SQPGALEQG*GR |
| | | | | EGRETKATRPAEEGSPPHVFRETSREAAA |
| | | | | EWKRIHGVF*SSEGHPG*FPFSFPSAGGN |
| | | | | RGTPLSCLLGVRDSTILPGCKRANAGPH |
| | | | | NQ*EAARGPCPR*S\SAAEMSGRGSVLAS |
| | | | | LSPLRKASLSSSSSLGPKERQTGAAA/AH |
| | | | | PSACSQAPGPRASPRGEADTQPPRG*LPR |
| | | | | SSPGCLQNPRPAPGRQTPGTRQTSCGDL/ |
| | | | | SSPARQPPHTAWA*APISASGQEPRDLP\S |
| | | | | SDSGLPELPQETETGSLPDPRKRHPGR*A |
| | | | | GGPGKSPTSASRNRTWTKYVAPDGQED |
| | | | | TGPGAQRRPAASAQQTLPAYCPGLHHVP |
| | | | | SLSGQP*WGPASQS/GSSGDWKTDAGAP |
| | | | | ASWRPPHFTLLRSREPSSLRALMCQRSLR |
| | | | | LPVFVSHRASSMRTFRFPPPQRTAILTWS |
| 134 | A | 8 | 434 | SRYVQKELNSKSVNHVIIVRFLGLSQLRN |
| | | | | IADGGWSSSVKMFLVNCLYPKYTHSIKG |
| | | | | WFLFFIFSNPLFFSRCPSHTEPQNLTGVSE |
| | | | | FLLLGLSEDPELQPVLAWLSLSIYLYTVL |
| | | | | GNLLIILAVSSDSHLIHTPIYFFQFSC |
| 135 | A | 1 | 3381 | MEVIPEGYRLSELKKCSKWIVVMVARLY |
| | | | | EYTKNQQIIHLKWVNHMLGCLLDRNDP |
| | | | | LRDVDEAAVPVLCICSADDPVCGPPDHT |
| | | | | LTTELFHSNPYFFLLLSRHGGHCGFLRQE |
| | | | | PLPAWSHEVILESFRALTEFFRTEERIKGL |
| | | | | SRHRASFLGGRRRGGALQRREVSSSSNL |
| | | | | EEIFNWKRSYTRLMAAAAGAAAAPGSR |
| | | | | EPQDRPECGAGHPGPRYYRHPERWLLRP |
| | | | | EAFLGPLRTRAPSAEDSQRERPAARSGPE |
| | | | | MRVRYPVVAAVLAPYLALSQDPMVKSS |
| | | | | ASGQGASGSYNHVREEMLIKAGGAMSR |
| | | | | RVVRQSKFRHVFGQAAKADQAYEDIRV |
| | | | | SKVTWDSSFCAVNPKFLAIIVEAGGGVPS |
| | | | | SSCLWPRWWLAGYRCVPAHTVDDVWV |
| | | | | HIIQAQQHLPGAHIPDDDHIVTTCPEWPG |
| | | | | MVAGNPMAPDFSLNSFAPPFANGLPRNV |
| | | | | LQDPPESPKAFSLPSLRLLLKCHLLRKAH |
| | | | | PDSPSEEVRGASARPPPRLGGVPNSSLRT |
| | | | | GHDDNRRFCGIERGERRSDSSFAKENNQ |
| | | | | KAYKETYGVSHITRHDMLQIPKQQQNEK |
| | | | | YQVPQFDQSTIKNIESAKGLDVWDSWPL |
| | | | | QNADGTVAEYNGYHVVFALAGSPKDAD |
| | | | | DTSIYMFIKSRDNSIDNDELNPGWASISR |
| | | | | GVLVCDECCSVHRSLGRHISIVKHLRHSA |
| | | | | WPPTLLQALQNFQRYTGIQHVHRIGMAE |
| | | | | RMWCDRNRERHTVSSSGATASPIQTVQL |
| | | | | DITAFLKTVKKNKHKFYPAFIHILARLMN |
| | | | | AHPEFRMAMKDGFIENMFFVSANPWVS |
| | | | | FTSFDLNVANMDNFFAPVFTMGKYYTQ |
| | | | | GDKVLMPLAIQEYGWNLDRAYDYVKER |
| | | | | RTVTKPNPSFMRQLEEYQGILLASVINHK |
| | | | | KRKNSPRIVQSNDLTEAAYSLSRDQKRM |
| | | | | LYLFVDQIRKSDGTLQEHDGICEIHVAKY |
| | | | | AEIFGLTSAEASKDIRQALKSFAGKEVVF |
| | | | | YRPEEDAGDEKGYESFPWFIKRAHSPSR |
| | | | | GLYSVHINPYLIPFFIGLQNRFTQFRLSET |
| | | | | KEITNPYAMRLYESLCQYRKPDGSGIVSL |
| | | | | KIDWIIERYQLPQSYQRMPDFRRRFLQHI |
| | | | | FVLRERPETVLIDLIQRTKDAYRELDNLQ |
| | | | | YRKMKKLLFQEAHNGPAVEAQEEEEDD |
| 136 | A | 181 | 246 | IALRY*E*YHPLPPCILGTTSQ |
| 137 | C | 105 | 395 | MYVKLISSDGHEFIVKREHALTSGTIKAM |
| | | | | LSGPGQFAENETNEVNFREIPSHVLSKVC |
| | | | | MYFTYKVRYTNSSTEIPEFPIAPEIALELL |
| | | | | MAANFLDC |
| 138 | A | 178 | 499 | ISRGGVVEVSGDPELQPVLAGLFLSMCL |
| | | | | VTVLGNLLIILAISPDSHLHTPMYFFLSNL |
| | | | | SLPDIGFTSTTVPKMIVDIQSHSRVISYAG |
| | | | | CLTQMSLFAIFGGMEERHA |
| 139 | A | 1 | 1337 | MNRTGACRLQGAGGPSLSLETPLCLNCS |
| | | | | VLPGDLYPGGARNPMACNGSAARGHFD |
| | | | | PEDLNLTDEALRLKYLGPQQTELFMPICA |
| | | | | TYLLIFVVGAVGNGLTCLVILRHKAMRT |
| | | | | PTNYYLFSLAVSDLLVLLVGLPLELYEM |
| | | | | WHNYPFLLGVGGCYFRTLLFEMVCLAS |
| | | | | VLNVTALSVERYYAVVHPLQARSMVTR |
| | | | | AHVRRVLGAVWGLAMLCSLPNTSLHGH |
| | | | | RQLHVPCRGPVPDSAVCMLVPPRALYN |
| | | | | MVVQTTALLFFCLPMAIMSVLYLLIGLR |
| | | | | LRRERILLMQEAKGRGSAAARSRYTCRL |
| | | | | QQHDRGRRQVTKMLFVLVVVFGICWAP |
| | | | | FHADRYMWSVVSQWTDGLHLAEQHVH |
| | | | | VISGIFFYLGSAANPVLYSLMSSRFRETFQ |
| | | | | EALCLGACCHRLRPRHSSHSLSRMTTGS |
| | | | | TLCDVGSLGSWVHPLAGNDGPEAQQET |
| | | | | DPS |
| 140 | A | 1 | 1542 | ALHEFGTSGCFKSLALIQATDSRILQAGN |
| | | | | ILEIRVGQAGARRVATMTSPVLVDIREEV |
| | | | | TCPICLELLTEPLSIDCGHSFCQACITPNG |
| | | | | RESVIGQEGERSCPVCQTSYQPGNLRPNR |
| | | | | HLANTVRRLKEVVLGPGKQKAVLCAD |
| | | | | HGEKLQLFCQEDGKEKFQESLKKLKNEE |
| | | | | QEAEKLTAFIREKKTSWKARETFSEDVL |
| | | | | GQESWQSTNARENAGIPGLEAAHFWIAI |
| | | | | PFCAMYLVALVGNAALILVIAMDNALH |
| | | | | APMYLFLCLLSLTDLALSSTTVPKMLAIL |
| | | | | WLHAGEISFGGCLAQMFCVHSIYALESSI |
| | | | | LLAMAFDRYVAICNPLRYTTILNHAVIGR |
| | | | | IGFVGLFRSVAIVSPFIFLLRRLPYCGHRV |
| | | | | MTHTYCEHMGIARLACANITVNIVYGLT |
| | | | | VALLAMGLDSILIAISYGFILHAVFHLPSH |
| | | | | DAQHKALSTCGSHIGIILVFYIPAFFSFLT |
| | | | | HRFGHHEVPKHVHIFLANLYVLVPPVLN |
| | | | | PILYGARTKEIRSRLLKLLHLGKTSI |
| 141 | B | 30 | 170 | MGRAPTPSVDALGEPDRRGAQEVQGEA |
| | | | | AVGAAARGLSMDALDLTDKL |
| 142 | B | 1 | 1923 | MTTSALRRQVKNIVHNYSFAFIKVREAT |
| | | | | SNDPWGPPSSLMSELADLTFNTVAFTEV |
| | | | | MGMLWRRLNDSGKNWRHVYKALTLLD |
| | | | | YLLKTGSERVAHQCRENLYTIQTLKDFQ |
| | | | | YIDRDGKDQGVNVREKVKQVMALLKDE |
| | | | | ERLRQERTHALKTKBRMALEGIGIGSGQ |
| | | | | LGFSRRYGEDYSRSRGSPSSYNCEDMMV |
| | | | | IAASSSSPRYTSDLEQARPQTSGEEELQL |
| | | | | QLALAMSREEAEKPVPPASHRDEDLQLQ |
| | | | | LALRLSRQEHEKEVRSWQGDGSPMANG |
| | | | | AGAVVHHQRDREPEREERKEEEKLKTSQ |
| | | | | SSILDLADIFVPALAPPSTHCSADPWDIPG |
| | | | | FRPNTEASGSSWGPSADPWSPIPSGTVLS |
| | | | | RSQPWDLTPMLSSSEPWGRTPVLPAGPP |
| | | | | TTDPWALNSPHHKLPSTGADPWGASLET |
| | | | | SDTPGGASTFDPFAKPPESTETKEGLEQA |
| | | | | LPSGKPSSPVELDLFGDPSPSSKQNGTKE |
| | | | | PDALDLGILGEALTQPSKEARACRTPESF |
| | | | | LGPSASSLVNLDSLVKAPQVAKTRNPFL |
| | | | | TGLSAPSPTNPFGAGEPGRPTLNQMRTGS |
| | | | | PALGLAGGPVGAPLGSMTYSASLPLPLSS |
| | | | | VPAGLTLPASVSVFPQAGAFAPQPLLPTP |
| | | | | SSAGPRPPPPQTGTNPFL |
| 143 | A | 548 | 645 | QVFRLSHAWPKIPFLGIHEATNPRSENTR |
| | | | | LAT |
| 144 | A | 3 | 652 | GRRVYYDEGVASSDDDSSGDESDDGTS |
| | | | | GCLRWFQHRRNRRRRKPQRNLLRNFLV |
| | | | | QAFGGCFGRSESPQPKASRSLKVKKVPL |
| | | | | AEKRRQMRKEALEKRAQKRAEKKRSKL |
| | | | | IDKQLQDEKMGYMCTHRLLLLGAGESG |
| | | | | KSTIVKQMRIPDVNGFNGEGGEEDPQAA |
| | | | | RSNSDGEKATQVKDIKTTWKKPLNPCGR |
| | | | | LTKPVPPVSWPPPKPIQRDYFLMD |
| 145 | A | 2 | 8450 | RKALLKGQLKSKKNYFSNSPWDIEEKGT |
| | | | | GGFGASSLKTDWREGGGGARWLNRTPP |
| | | | | EIVLHTGTPNRTTIHARQHLHKSHKIRLH |
| | | | | SRKENPCAWRRESKVLMLGERFLLLGER |
| | | | | REKSTEDFVLQLGYQLSHNTIKHQTDSRS |
| | | | | PRFQALFLDSVSRPILGQKGIHCPVGKGS |
| | | | | NAQGGNKCDIIEYLVWLMSGSPFLNRAG |
| | | | | ARLAEMTTRQMADWEDKLKSATMATA |
| | | | | PYNYSYIFKYIIIVMADCPHTIGVEFGTRII |
| | | | | EVSGQKIKLQIWDTAGQERFRAVTRSYY |
| | | | | RGAAGALMVYDITRRSTYNHLSSWLTD |
| | | | | ARNLTNKPNTVIILIGNKADLEAQRDVTYE |
| | | | | EAKQFAEENACHVSLGHVSLLGLAFKAL |
| | | | | HNQPNTERTVTMAVKFNMSFGGDTKTI |
| | | | | ALSFGRKEGNERERYGKSELQDISKLKPL |
| | | | | QDLISLILVENPVVTLPHYLQFTIFHLRSL |
| | | | | ESLEGQPVTTQDRQEAFERFSLVLEILAR |
| | | | | AIRQEKEIKDVHLGKEEVKLSLFADDVIV |
| | | | | YLENPIVSAQNLLKLIRNFSKLSGYKINV |
| | | | | QKSQAFLYTNDRQTESRIMSELPFTIASK |
| | | | | RIKYLGIQLKRDVKDLFKENYKPLLNEIK |
| | | | | EDTNKWRNIPCSWIGRINIMKMAILPKVI |
| | | | | YRFNAIPIKLPMTFFTEFEKTTLKFIWNQ |
| | | | | KRACIAKTILSKKNKAGGITLPDFKLYYK |
| | | | | ATVNKTAWDMVEAGNHHSLQTVTRTE |
| | | | | NQTPHVLTHRWELNNENTWTQEEVERL |
| | | | | ERDLEKKMIETEELKSKQTRFLEEIKNQD |
| | | | | KLNKSLKEEAMLQKQSCEELKSDLNTKN |
| | | | | ELYAEIDKAPDESPYIGKSRYKRNMFATE |
| | | | | SYIIDSAQAVQIKKMEPDEQLRNDHMNL |
| | | | | RGHTPLDTQLEDKEKKISAAQTRLSELH |
| | | | | DEIEKAEQQILRATEEFKQLEEAIQLKKE |
| | | | | AVVQYRQEMILAPTRKVLVDVERKPAD |
| | | | | SRKHWTVELTGLNDGLKVGDELSGRLQ |
| | | | | LVNKLRQEALDLELQMEKQKQEIAGKQ |
| | | | | KEIKDLQIAIDSLDSKDPKHSHIVIKAQKS |
| | | | | GKEQQLDIMNKQYQQLESRLDEILSRIAK |
| | | | | ETEEIKDLEEQLTEGQIAANEALKKDLEG |
| | | | | VISGLQEYLGTIKGQATQAQNECRKLRD |
| | | | | EKETLLQRLTEVEQERDQLEIVAMDAEN |
| | | | | MRKELAELESALQEQHEVNASLQQTQG |
| | | | | DLSAYEAELEARLNLRDAEANQLKEELE |
| | | | | KVTRLTQLEQSALQAELEKERQALKNAL |
| | | | | GKAQFSEEKEQENSELHAKLKHLQDDN |
| | | | | NLLKQQLKDFQNHLNHVVDGLVRPEEV |
| | | | | AARVDELRRKLKLGTGEMNIHSPSDVLG |
| | | | | KSLADLQKQFSEILARSKWERDEAQVRE |
| | | | | RKLQEEMALQQEKLATGQEEFRQACER |
| | | | | ALEARMNFDKRQHEARIQQMENEIHYL |
| | | | | QENLKSMEEIQGLTDLQLQEADEEKERIL |
| | | | | AQLRELEKKKKLEDAKSQEQVFGLDKEL |
| | | | | KKLKKAVATSDKLATAELTIAKDQLKSL |
| | | | | HGTVMKINQERAEELQEAERFSRKAAQA |
| | | | | ARDLTRAEAEIELLQNLLRQKGEQFRLE |
| | | | | MEKTGVGTGANSQVLEIEKLNETMERQ |
| | | | | RTEIARLQNVLDLTGSDNKGGFENVLEEI |
| | | | | AELRREVSYQNDYISSMADPFKRRGYW |
| | | | | YFMPPPPSSKVSSHSSQATKDSGVGLKYS |
| | | | | ASTPVRKPRPGQQDGKEGSQPPPASGYW |
| | | | | VYSPIRSGLHKLFPSRDADSGGDSQEESE |
| | | | | LDDDQEEPPFVPPPGYMMYTVLPDGSPVP |
| | | | | QGMALYAPPPPLPNNSRPLTPGTVVYGP |
| | | | | PPAGAPMVYGPPPPNFSIPFIPMGVLHCN |
| | | | | VPEHHNLENEVSRLEDIMOHLKSKKREE |
| | | | | RWMRASKRQSEKEMEELHHNIDDLLQE |
| | | | | KKSLECEVEELHRTVQKRQQQKDFIDGN |
| | | | | VESLMTELEIEKSLKHHEDIVDEIECIEKT |
| | | | | LLKRRSELREADRLLAEAESELSCTKEKV |
| | | | | CLLVVWGVSSVWTKNAVEKFTDAKRSL |
| | | | | LQTESDAEELERRAQETAVNLVKADQQL |
| | | | | RSLQADAKDLEQHKIKQEEILKEINKIVA |
| | | | | AKDSDFQCLSKKKLEKLTEELQKLQKDIE |
| | | | | MAERNEDHHLQVLKESEVLLQAKRAEL |
| | | | | EKLKSQVTSQQQEMAVLDRQLGHKKEE |
| | | | | LHLLQGSMVQAKADLQEALRLGETEVT |
| | | | | EKCNHIREVKSLLEELSFQKGELNVQISE |
| | | | | RKTQLTLIKQEIEKEEENLQVVLRQMSK |
| | | | | HKTELKNILDMLQLENHELQGLKLQHD |
| | | | | QRVSELEKTQVAVLEEKLELENLQQISQ |
| | | | | QQKGEIEWQKQLLERDKREIERMTAESR |
| | | | | ALQSCVECLSKEKEDLQEKCDIWEKKLA |
| | | | | QTKRVLAAAEENSKMEQSNLEKLELNV |
| | | | | RKLQQELDQLNRDKLSLHNDISAMQQQ |
| | | | | LQDLVDTGLALTTSSKDGFISSFHLFFHL |
| | | | | KDLLHTTKHQDVLLSEQTRLQKDISEWA |
| | | | | NRFEDCQKEEETKQQQLQVLQNEIEENK |
| | | | | LKLVQQEMMFQRLQKERESEESKLETSK |
| | | | | VTLKEQQHQLEKELTDQKSKLDQVLSK |
| | | | | VLAAEERVRTLQEEERWCESLEKTLSQT |
| | | | | KRQLSEREQQLVEKSGELLALQKEADSM |
| | | | | RADFSLLRNQFLTERKKAEKQVASLKEA |
| | | | | LKIQRSQLEKNLLEQKQENSCIQKEMATI |
| | | | | ELVAQDNHERARRLMKELNQMQYEYTE |
| | | | | LKKQMANQKDLERRQMEISDAMRTLKS |
| | | | | EVLDEIRTSLKNLNQFLPELPADLEAILE |
| | | | | RNENLEGELESLKENLPFTMNEGPFEEKL |
| | | | | NFSQVHIMAQLRHCMSKQAEYLIKGKR |
| | | | | QTEGTLHSLRRQVDALGELVTSTSADSA |
| | | | | SSPSLSQLESSLTEDSQLGQNQADSVRIEL |
| | | | | NKRTCSWCPLKKYLVYGATTLTCLMSQ |
| | | | | VLYCVVRQ |
| 146 | A | 146 | 1169 | AHLLLFMTITRKRLTQLFCPPDLTEERLG |
| | | | | DGKSADNTEVFSDKDTDQRSSPDVAKSK |
| | | | | GCFTPESPEIVSVEEGGYAVQKNGGNPES |
| | | | | RPDSPKCHAEQNHLLIEGPSGTVSLPFSL |
| | | | | KANRPPLEVLKKIFPNQKPTVLELILKGC |
| | | | | GGDLVSAVEVLLSSRSSVTGAERTSAEPE |
| | | | | SLALPSNGHIFEHTLSSYPISSSKWSVGSA |
| | | | | FRVPDTLRFSADSSNYVPSPLAGPLQPPF |
| | | | | PQPPRYPLMLRNTLARSQSSPFLPNDVTL |
| | | | | WNTMTLQQQYQLRSQYVSPFPSNSTSVF |
| | | | | RSSPVLPARATEDPRISIPDDGCPFVSKQS |
| | | | | IYTEDDYDERSDSSDSRTLNTSS |
| 147 | A | 5 | 408 | VGWTPPTDVSPLQTWRDTVQPELHQPA |
| | | | | GSSTPALGSVGNQKHSSGTPSNAPKRQK |
| | | | | VEELGPHPGAEPAPVQPAPHHPAQLPLEL |
| | | | | PQRTKSRSGDKGLRPRLRASLWGAPVPR |
| | | | | PGPAPWRGAPTSRDVTELPWRR |
| 148 | A | 2 | 910 | WKPPGELRAPVPLSPGTSSGCPRTSPRRP |
| | | | | RSAASPSDALGSRGRSAPSPSSPYPPAGQ |
| | | | | GGANGWACHPHRSHAVPRPPAAPGAEP |
| | | | | GRRPCTWDPCPEPP*ESH*PPRPSAVDAS |
| | | | | GQPPPPAGPGQEGVGP\SLPSQAQGWGC |
| | | | | WSPPPGRPP/VLPEAEGLLPEQSPAGLLQ |
| | | | | DKDLLLGLALPYPEKENRPPGWERTRKR |
| | | | | SREHKRRRDRLRLHQGRALVRGPSSLMK |
| | | | | KAE/PLRSPGAGCSH/RRNPPPAWRPPCSF |
| | | | | SPPLRQHLPQKSP*SCPSPPCGPSRHSPGL |
| | | | | TGR*CPRWTWPCSTGPIMKT |
| 149 | A | 3 | 212 | SIITPSLARGDCEQSPTSSRTSSLGSGGPD |
| | | | | CAITVKSPGREPGRDHLNGVAMNVRTGS |
| | | | | AQADGSDSEKP |
| 150 | A | 199 | 384 | SFSFIKGQIPHAFCLRDYWVQSPIEEMILR |
| | | | | AQVKMQFKSIVCRITFCPFGLQFNVSCIH |
| | | | | FIQ |
| 151 | A | 199 | 384 | SFSFIKGQIPHAFCLRDYWVQSPIEEMILR |
| | | | | AQVKMQFKSIVCRITFCPFGLQFNVSCIH |
| | | | | FIQ |
| 152 | A | 3 | 1311 | AWWGGGARCVQRSPMGSEAAMGLDAL |
| | | | | VPLAVTVAIFLLLVDLMQQHQRWTARY |
| | | | | PPGPLLGGPWPDGGPDPTEALTLPLQLR |
| | | | | HRFGDVFSLQLAWMPVVVLNGLAAVRE |
| | | | | ALVTCGEDTADRPPAPIYQVLGMGGGG |
| | | | | RGQGLHDHAHVSVPPPGVFLAHYGHAW |
| | | | | REQRRFSVSTLRNLGLGKKSRELGRWRT |
| | | | | GKATPDPHLPPPGRPFHPNGLLNKAASN |
| | | | | VIASLTCGCRFEYDDRCRMWRSFGGFPV |
| | | | | LSPEYPLSPAQAKGNPESSFNDENLRMV |
| | | | | VADLFFAGMVRVCPGRVQQIDNVIGQV |
| | | | | W*PEMGDQARMPCTTAVIHEVQRFGDIV |
| | | | | LLGGPSILESSPHSHPASPAQGMMLFTNL |
| | | | | SSVLKDEAVWEKPFRFHPDGVLQGYHP |
| | | | | GARLTDAPPLPTGRRACLGEPLARIELFL |
| | | | | FFTSLLQHFSFSVPTGQPRPSH |
| 153 | A | 140 | 365 | SLVNNTLGLRRVPSVHIGSKDGPTATTA |
| | | | | NLLQNFRELLPRHLQLSQGRCGSSQKVF |
| | | | | HGCLLKWQSHISSMSCFPA |
| 154 | A | 1 | 685 | MLGDATWYAEKQQAKRDRDKGTLEQR |
| | | | | PEGNVGMLGEEPSRAIGQVPKLSCMDSQ |
| | | | | QEDLRFPGMWVSLYFGILGLCSVITGGCI |
| | | | | IFLHWRKNLRREEHAQQWVEVMRAATF |
| | | | | TYSPLLYWINKRRRYGMKCSHQHGPCPC |
| | | | | CHQD*D*GPESRCSVGFGHPRRQEPC*PR |
| | | | | QQPQGGSPCSPATCT\ELAPQQPQARSPF |
| | | | | PLPIFQE/RALCPTLVQPTPPAEPLCLLSFG |
| | | | | HLS |
| 155 | A | 686 | 948 | YPVLTLKNRGGPLYTVEPVPPTGERFPSP |
| | | | | RPSPPSYTPSPSFPTRKWGNG\KSHSNSFP |
| | | | | PIRPATVPPPTAPKPQKTILRKSTITTV |
| 156 | B | 1 | 864 | MLVRLVARRTRQSHAEKKDHRGKTAVY |
| | | | | KPRREASENNPADTLISAPQPPEGEKIHFC |
| | | | | DDTQPMVAEMHGELIEFNERLHRALVA |
| | | | | KEALVSQMRQELIDLRGPAADCVSPGDS |
| | | | | DQGLLSASLMPRTSLSHGEATGYIHETSN |
| | | | | ENIVSKPCRLIPPFPLPNRPIFLINFNSSLKT |
| | | | | QVKRLLFETFHDHPQQPQSMEKLSSTKLV |
| | | | | PGAKMVGNCCFIFFVCTVGAMPPNLEGG |
| | | | | CEVKDNDSNQATSEPTNKDLRGTFCAGL |
| | | | | FCALGIYSGGQRDKMAAPKECRLNKQFS |
| | | | | K |
| 157 | B | 1 | 555 | MAEATNKFKLMNGNTLVNVLYITQQFA |
| | | | | GEAHDPLVEALVTEAWGRLERFDIKLLS |
| | | | | EFSSCLADQHLYFSPLMGKIADIVHRNLE |
| | | | | TIQNLSSLSVLMVNISSLISRHFQEQLVNK |
| | | | | TELVFDTTDSSEFNVAKRMVQFLRNFRY |
| | | | | HYQPLLESFVKFFVALGPIAGPEEKKQLK |
| | | | | STMLLMSEELTNE |
| 158 | C | 97 | 270 | MYLPFTAITLQNVQGGPHCIILCFCHTEV |
| | | | | TLITTSPELLSSDKSSWGLIRLNRCNNT |
| 159 | B | 21 | 371 | MPPRRIIVEVKVLDVQKRRVPNKHYVYII |
| | | | | RYTWSSGSTEAIYRRYSKFFDLQMQMLD |
| | | | | KEGGQKDPKQRIIPFLPGKILFRRSHI |
| | | | | RDVAVKRLIPIDEYCKALIQLPPYISQCDE |
| 160 | B | 1 | 783 | MSAYLQMLILGQSSQLPSQYLQTADYC |
| | | | | WGKPPSCAGVVPIHGLHPGVCMLRGQW |
| | | | | SLALNEYGNHQLGYQIQPRFWCHNPRS |
| | | | | WRVPIHRGEGIEEMRGRRGKKRREEKRE |
| | | | | RVRMTSSVPSVLQLWKWPNGSSRNHIH |
| | | | | KKAPVPEIESSEFYLFMCTHETDLKHSQ |
| | | | | MCPLLMGVDGSPASLDYCEPPEYAETPT |
| | | | | AQYLPKWLPAGAPAMGLHSFVLGTQGP |
| | | | | GGVDSQRDYLFWGLQKSVGKAQFSGRL |
| | | | | AEESMASVAWAVLK |
| 161 | A | 1 | 668 | MLCSTAYPKAELLPGGNLGGAG/EAGEG |
| | | | | AGQPRGAPAHGQLPA*HGGLGAGHPPSH |
| | | | | LGPAGRSAQGFSPARAPGA*ELGSP\GRG |
| | | | | NGLQPQPPSPTPADGTAT/GAVYQNKGPS |
| | | | | SCLI*G\GLGCSELAGPWAVGMPGSVGT |
| | | | | GP\RGGAGRGGRAAGKTLPARVPGIPAA |
| | | | | AAPPR*ARHGPDAGRAGLLRDAATARR |
| | | | | RPADCSPAAQPTAPHAGHASVGVCRHPC |
| | | | | LR |
| 162 | A | 97 | 221 | YKSS*SDKLRSKIFSPHQRLHVLMTLETG |
| | | | | QPRLLGSWNIIGV |
| 163 | A | 7 | 798 | GIKPASFNKVTDPEVKEHEGCIRQNKSIR |
| | | | | LSIRDLLNHAFFAEDTGLRVELAEEDDCS |
| | | | | NSSLALRLWVEDPKKLKGKRKDNEAIEF |
| | | | | SFNLETDTPEEVAYL*VKSGFFHESDSKA |
| | | | | VAKSIRDRVTPIKKTREKKPAGCLEERRD |
| | | | | SQCKSMGNVFPQPQNTTLPLAPAQQTGA |
| | | | | ECEETEVDQHVRQQLLQRKPQQHCSSVI |
| | | | | GDNLSEAGAASVIHSDTSSQPSVAYSSNQ |
| | | | | TMGSQMVSNIPQAEVNVPGQIYSSQQLV |
| | | | | GHYQQV |
| 164 | A | 159 | 1091 | ETLPSNTMASNVTNKTDPRSMNSRVFIG |
| | | | | NLNTLVVKKSDVEAIFSKYGKIVGCSVH |
| | | | | KGFAFVQYVNERNARAAVAGEDGRMIA |
| | | | | GQVLDINLAAEPKVNRGKAGVKRSAAE |
| | | | | MYGSVTEHPSPSPLLSSSFDLDYDFQRDY |
| | | | | YDRMYSYPARVPPPPPIARAVVPSKRQR |
| | | | | VSGNTSRRGKSGFNSKSGQRGSSKSGKL |
| | | | | KGDDLQAIKKELTQIKQKVDSLLENLEK |
| | | | | MEKEQSKQAVEMKNDKSEEEQSSSSVK |
| | | | | KDETNVKMESEGGADDSAEEGDLLDDD |
| | | | | DNEDRGDDQLELIKDDEKEAEEGEDDRD |
| | | | | SANGG |
| 165 | B | 59 | 431 | XEKSHRVDPQVKVKRHASSANQYKYGK |
| | | | | NRAEEDARRYLVEKEKLEKEKETIRTELI |
| | | | | ALRQEKRELKEAIRSSPOAKLKALEEAV |
| | | | | ATLEAQCRAKEERRIDLELKLVAVKERL |
| | | | | QQSLAGGPALGLS |
| 166 | A | 2 | 1135 | GRVGFFFAGNPGSDSPGGLLLGLTPVLR |
| | | | | WVADGGTIPKRHE\LVKGPKKVEKVDK\ |
| | | | | ETELVAQWNYCTLS\QEILRRPIVACELG |
| | | | | RLYNK\EPVIEFLLDKSAEKALGKGSISH* |
| | | | | NALTNC*QS*KLSDNPCPGKGIKGNTKG |
| | | | | DK\HDDLQAGASFI/CP/LVQGPGRWNGR |
| | | | | HRFLLPSGGCGLCCFS*AEPWKEIKAEFC |
| | | | | HTCGA\AFPORMMIIVLNGTKEDVDVLK |
| | | | | TRME/AEKAVERSFKRISKKPKAAESVSK |
| | | | | TQMSVEGSPRAHQKLRPGKP*RSPALDS |
| | | | | REKKTNLAPKSTAMNESSSGKAGKASV |
| | | | | WSHKEVHR*PV/TESEAYKSLFTTHSFRQ |
| | | | | ALPRRSLAHWGSPHTSYLLLKPALPPAP |
| | | | | APEGCLSFHVGQVRLCL |
| 167 | B | 201 | 1244 | MRVVVIGAGVIGLSTALCIHERYHSVLQP |
| | | | | LHIKVYADRFTPLTTTDVAAGLWQPYLS |
| | | | | DPNNPQEADWSQQTFDYLLSHVHSPNAE |
| | | | | NLGLFLISGYNLFHEMPDPSWKDTVLGF |
| | | | | RKLTPRELDMFPDYGYGWFHTSLILEGK |
| | | | | NYLQWLTERLTERGVKFFQRKVESFEEV |
| | | | | AREGADVIVNCTGVWAGALQRDPLLQP |
| | | | | GRGQIMKVDAPWMKHFILTHDPERGIYN |
| | | | | SPYIIPGTQTVTLGGWQLGNWSELNNIQD |
| | | | | HNTIWEGCCRLEPTLKNARIIGEATGFRP |
| | | | | VRPQIRLEREQLRTGPSNTEVLHNYGHGG |
| | | | | YGLTIHWGCALEAAKLFGRILEEKKLSR |
| | | | | MPPSHL |
| 168 | A | 3 | 336 | PGSTISCGGHVRSCVWGLLPYIPPREQVT |
| | | | | LLAMKPGPPAQRGLSPQQGPRLPLCKAP |
| | | | | APPPKACPSG*T*PEQSGCSVRSRRWLSP |
| | | | | SRSASCSRNPSPSPRCTSATPPAT |
| 169 | A | 182 | 629 | HLHVQGTSLYPA*PALREADGVPQQPW |
| | | | | ALLSLGSQNNSVWNVQLPAGPHGGAHL |
| | | | | QPAPEPHPRILPYLL*EDPPTGGTQGSPVH |
| | | | | VWLPAPIQSDGPQPGSQPVPDATLAGAQ |
| | | | | HPCQPSCSLLQSGLQGQBLVLQGGCGRR |
| | | | | PWTYHVRPT |
| 170 | B | 109 | 234 | XGWERSGATTSSEAPPSGNAGIVVKSTL |
| | | | | CAHSIPALGPLVASX |
| 171 | A | 288 | 474 | EEEEGVGDPGPHPAAAEALSELHPEPPPA |
| | | | | HPGCPACPEPAHRGAELPALPGSLSHQL |
| | | | | ASCP |
| 172 | A | 288 | 474 | EEEEGVGDPGPHPAAAEALSELHPEPPPA |
| | | | | HPGCPACPEPAHRGAELPALPGSLSHQL |
| | | | | ASCP |

[0469] TABLE 7

| | Position of end of | | |
|---|---|---|---|
| | signal in amino acid | MaxS | MeanS |
| SEQ ID NO: | sequence | (maximum score) | (mean score) |
| 1 | 22 | 0.966 | 0.767 |
| 7 | 18 | 0.958 | 0.889 |
| 9 | 22 | 0.966 | 0.767 |
| 20 | 20 | 0.971 | 0.941 |
| 23 | 31 | 0.936 | 0.729 |
| 25 | 30 | 0.970 | 0.574 |
| 29 | 30 | 0.996 | 0.884 |
| 31 | 25 | 0.985 | 0.864 |

What is claimed is:

1. An isolated polynucleotide comprising a nucleotide sequence selected from the group consisting of SEQ ID NO: 1-43, or 87-129, a mature protein coding portion of SEQ ID NO: 1-43, or 87-129, an active domain coding portion of SEQ ID NO: 1-43, or 87-129, and complementary sequences thereof.

2. An isolated polynucleotide encoding a polypeptide with biological activity, wherein said polynucleotide hybridizes to the polynucleotide of claim 1 under stringent hybridization conditions.

3. An isolated polynucleotide encoding a polypeptide with biological activity, wherein said polynucleotide has greater than about 90% sequence identity with the polynucleotide of claim 1.

4. The polynucleotide of claim 1 wherein said polynucleotide is DNA.

5. An isolated polynucleotide of claim 1 wherein said polynucleotide comprises the complementary sequences.

6. A vector comprising the polynucleotide of claim 1.

7. An expression vector comprising the polynucleotide of claim 1.

8. A host cell genetically engineered to comprise the polynucleotide of claim 1.

9. A host cell genetically engineered to comprise the polynucleotide of claim 1 operatively associated with a regulatory sequence that modulates expression of the polynucleotide in the host cell.

10. An isolated polypeptide, wherein the polypeptide is selected from the group consisting of:
(a) a polypeptide encoded by any one of the polynucleotides of claim 1; and
(b) a polypeptide encoded by a polynucleotide hybridizing under stringent conditions with any one of SEQ ID NO: 1-43, or 87-129.

11. A composition comprising the polypeptide of claim 10 and a carrier.

12. An antibody directed against the polypeptide of claim 10.

13. A method for detecting the polynucleotide of claim 1 in a sample, comprising:
a) contacting the sample with a compound that binds to and forms a complex with the polynucleotide of claim 1 for a period sufficient to form the complex; and
b) detecting the complex, so that if a complex is detected, the polynucleotide of claim 1 is detected.

14. A method for detecting the polynucleotide of claim 1 in a sample, comprising:
a) contacting the sample under stringent hybridization conditions with nucleic acid primers that anneal to the polynucleotide of claim 1 under such conditions;
b) amplifying a product comprising at least a portion of the polynucleotide of claim 1; and
c) detecting said product and thereby the polynucleotide of claim 1 in the sample.

15. The method of claim 14, wherein the polynucleotide is an RNA molecule and the method further comprises reverse transcribing an annealed RNA molecule into a cDNA polynucleotide.

16. A method for detecting the polypeptide of claim 10 in a sample, comprising:
a) contacting the sample with a compound that binds to and forms a complex with the polypeptide under conditions and for a period sufficient to form the complex; and
b) detecting formation of the complex, so that if a complex formation is detected, the polypeptide of claim 10 is detected.

17. A method for identifying a compound that binds to the polypeptide of claim 10, comprising:
a) contacting the compound with the polypeptide of claim 10 under conditions sufficient to form a polypeptide/compound complex; and
b) detecting the complex, so that if the polypeptide/compound complex is detected, a compound that binds to the polypeptide of claim 10 is identified.

18. A method for identifying a compound that binds to the polypeptide of claim 10, comprising:
a) contacting the compound with the polypeptide of claim 10, in a cell, under conditions sufficient to form a polypeptide/compound complex, wherein the complex drives expression of a reporter gene sequence in the cell; and
b) detecting the complex by detecting reporter gene sequence expression, so that if the polypeptide/compound complex is detected, a compound that binds to the polypeptide of claim 10 is identified.

19. A method of producing the polypeptide of claim 10, comprising,
a) culturing a host cell comprising a polynucleotide sequence selected from SEQ ID NO: 1-43, or 87-129, a mature protein coding portion of SEQ ID NO: 1-43, or 87-129, an active domain coding portion of SEQ ID NO: 1-43, or 87-129, complementary sequences thereof and a polynucleotide sequence hybridizing under stringent conditions to SEQ ID NO: 1-43, or 87-129, under conditions sufficient to express the polypeptide in said cell; and
b) isolating the polypeptide from the cell culture or cells of step (a).

20. An isolated polypeptide comprising an amino acid sequence selected from the group consisting of any one of the polypeptides SEQ ID NO: 44-86, or 130-172, the mature protein portion thereof, or the active domain thereof.

21. The polypeptide of claim 20 wherein the polypeptide is provided on a polypeptide array.

22. A collection of polynucleotides, wherein the collection comprising the sequence information of at least one of SEQ ID NO: 1-43, or 87-129.

23. The collection of claim 22, wherein the collection is provided on a nucleic acid array.

24. The collection of claim 23, wherein the array detects full-matches to any one of the polynucleotides in the collection.

25. The collection of claim 23, wherein the array detects mismatches to any one of the polynucleotides in the collection.

26. The collection of claim 22, wherein the collection is provided in a computer-readable format.

27. A method of treatment comprising administering to a mammalian subject in need thereof a therapeutic amount of a composition comprising a polypeptide of claim 10 or 20 and a pharmaceutically acceptable carrier.

28. A method of treatment comprising administering to a mammalian subject in need thereof a therapeutic amount of a composition comprising an antibody that specifically binds to a polypeptide of claim 10 or 20 and a pharmaceutically acceptable carrier.

The application's sequence listing, which the Patent Office published only in electronic form, follows.

SEQUENCE LISTING (172 sequences)

SEQ ID NO: 1 - DNA, 3091 bp, Homo sapiens
  CDS (189)..(1739)
aatgtcgacgatttcgtgccggggattcgccggcccacgccaggccccgggcggagaatgaaaggacaatctgcttcatcctgattctgcggcattccaaactgtggtatccttgggggttctcttaacattgctatggtgcagaagatttaaaatcagctgatgttcacaaggaatacagtcacgtgatgtatgaagggaaacatatacacttctctgaggttgacaataagcccttgtgctcatatagccccaaactgtgcaagcagaggcgactcaacggctacgccttctgtatcagacacgttctggaggacaagactgcccccttcaagcaatgtgaatatgtggccaagtataacagccaacgctgcaccaaccccatccccaaatcagaggatcgtaggtactgcaacagccacttgcaggtacttggctttatcccgaaaaaagagaggaagaaaaagaatgatcctatagatgaggtgaaggtcaggcaccagatggataccatggcctttagcctgacagtgcccacgttggccttgaagatgcccaacggactggatggaatgtccctctctccacctggggcaagggtccctctccactacctggaaactgaattggaagacccatttgctttcaatgaggaagatgatgacctaaagaaaggggcaactgtgagaaagaagttgcagagcaagttggcccagaatcggcagcgccagagagagacagagattttaaaagttcgacaagagcactttagtccccctcctgcaccttcacagcagcagcctccgcagcagcactcccacctgtcacctttatctacttctttaaaacctccagcgccaccgcagggttcagtctgcaagtcacctcaacctcagaacaccagcctaccaatgcagggggtggcacccaccacacacactatagcacaagcacggcagttgtctcacaagaggcctctgcccctcctgccatccagtagggctcccactgtggacccacccaggactgaccggatcctcatgaaagccacagccttctctccacacttctcatgtataagccgactgcagagactggtgaaactgtgcacccagaaacatcagttggacactgatctgtttccccatttaggtttggactggtctgaagagagcggagaggaaccagaggactcagagcaggcctcgccctaccaggttgcatggtccatccgggaaaccctcagatatcaaagacatgtgtcagatgatgatgatgcggagagtaggagctccagggtgactcaactttgcacttactttcagcagaaatataagcacctctgccgcctggagcgggcagaatctcgtcaaaagaaatgccggcatacgtttaggaaagctttgctgcaggcggccagtaaagaaccagaatgcactggtcagttaatacaagaactgcggagagctgcatgcagtcgaaccagcataagccggaccaagctgagggaggtggaaccagcagcatgcagtggaaccgtgaagggtgaacagtgcgctaacaaagcccttccattcaccagacattgtttccaacatatcctcttgaaccactctcagcagctcttctcaagttgcacagccaagtttgcagatggacagcagtgctctgtgccagtttttgacattacacatcagacacctctgtgtgaagaacatgccaaaaaatggataattccttgagaggagataactcccgtaaagttcagcaccagcagcagaggaaacccaggaaaaaaaccaagcctcctgcactaaccaaaaaacacaagaagaagagaaggcgtggacctcgtcgaccccaaaaacccattccacctgcagtcccccaagggaacctcagcatgcccgccagcgtctcactgccagtggaggcctctcacatccggagcccatccacgccagagctgagtgctgatgagttgccggatgacattgccaatgagatcactgacattccacatgacttggaattgaaccaggaggacttttcagatgtcctgccacggctacctgatgacttacaagattttgatttttttgaagggaagaatggagacctcctcccaactaccgaagaggctgaggagcttgaacgggccttgcaggctgtaacttctctcgagtgcctgagtaccattggggtccttgcccagtcagatggtgtgccagtccaggagttgtcagatagaggaataggggtgttctccacaggtactggagcttcaggaatacaatccttgagccgagaggtgaacacagacctaggggagctattgaatgggcgtatagtacatgataatttttctagtctagagctggatgagaacctgctccgttctgctaccttgtcaaacccacctacacccctggcagggcagatccaggggcagttctctgccccagccaacgttggccttacttctgccactctgatcagccagagtgcacttggggagagagccttcccaggacagtttcatggacttcatgacggcagccatgcctcccagaggccacatcctgcccagctgctgagcaaggcagatgacctaatcacctcacgacagcaatacagcagtgatcactcacactcctcaccccatggaagccattatgatagtgagcatgtgccgtctccctacagtgaccatatcacctctccccacacaacatcgtactctggtgataatatggcagctaccttttcagcagagatgcccatcatggcgcagcacttgctcccaacccaacttgaggtgccacttggaggcgtggtaaaccccagaactcactggggcaatctccctgtcaaccttggagacccctctccatttagcaaccttctcggcgcagatggacatcttctttccacttccctatccacgccacccaccacttcgaactcagagaccacacagcctgccttcgccaccgtgacccccagcagctccagtgtgcttccggggttaccacagaccagcttcagtggcatggggccttctgctgaactaatggcctccacctctatt

SEQ ID NO: 2 - DNA, 3601 bp, Homo sapiens
  CDS (86)..(1537)
actggcggccatggaactcaccggtaatagaggacacatctcttaactgggttgctctaagaactgatgtctaaaccgtctcagcatggcctgtagaggaggagctgggaatggccaccgtgcctcagctacactctctcgggttagccctggaagtctttacacatgtagaacccgtacccataatatatgcatggtatctgactttttctacccaaatatgggaggcgtggaaagccacatttaccagctctctcagtgcctgattgaaagagggcataaggttataattgtcacccatgcttatggaaatcgaaaaggcatccgttacctcaccagtggcctcaaagtctattacttgcctctgaaagtcatgtacaaccagtctacagccacgaccctctttcacagtctgccattgctcaggtacatatttgttcgggagagagtcacgataatccattcacatagttctttttctgctatggcccatgatgctctcttccacgccaagacaatggggcttcagacagtcttcacggaccattccctttttggatttgctgatgtcagctcggtgcttacaaacaagcttctaaccgtgtctctttgtgatacaaaccacatcatttgtgtgtcttatactagtaaggaaaatactgtactaagagcagcactgaatcctgaaatagtgtccgtcattcctaatgctgtagatcctactgacttcactccagacccatttagaaggcatgatagtataactattgttgttgtcagcagacttgtttacagaaaagggatcgatttgcttagtggtataatacctgaactctgtcagaaatatccagatttaaatttcataattggaggagagggaccaaagagaatcattttggaagaagttcgggaaagataccagctgcatgacagggtgcgtcttttgggagctttagaacacaaggatgttagaaatgtcttagttcaaggacatatttttctgaatacctcccttactgaagcattctgcatggcgatcgtggaagcagccagttgtggtttacaggttgtaagtaccagagttggtggaattcctgaggtgcttccagaaaaccttattattttatgtgagccttcagtaaaatctttgtgtgaaggattggaaaaggctattttccaactgaagtcagggacattgccagctccagaaaacatccataacatagtaaagactttctacacctggaggaatgttgcagaaagaactgaaaaggtatatgaccgggtatcagtggaagctgtgttgccaatggacaaacgactggacagacttatttctcactgcggcccagtaacaggctacatctttgctttgttggcagttttcaacttcctcttcctcattttcttgagatggatgactccagattctatcattgatgttgcaatagatgccactgggccacggggtgcctggactaataactattctcacagtaaaagagggggtgagaataatgagatatctgaaaccaggtagaaggaagcctagattgtaagattttaaacatttgtaatagttctataaagactatggaaaataaccttgcttttggggggtttttgtttttttagagttaatttagtaagttatgctacctctatatcattcaatattttctgttgaggaaagataaaaatgtatgcaattcctgagtgtagaaacttcttgcacttatttaaaatttaggagagaacatttaagccactcaggtatgcaatttttcagactactgaaatccctgtagcagagatgttttaacattatattttgagagctttgggtgctgaagggccaaacgttttctgggcattttttggccagtttttaatgtaacaccattagacactcaccagatgtttacaagttttctttaggggaactacaacaattatatgaactgttttatatcatgttcatatacatttattaggaatctaaatcatgtctttgaacatttattaggttcactcagtaggtgttacatgtaattaacaggttccttgagtaagatagtccatcagttaccagcacattttgaacccctgctctgtgtagaatgttgaactagatgcttcccgccattaaggaccaggggtgcattcactctttgtttaccattcaaatggcttacttcatcataattgtggttgatatgagatcaatatccaacatgccaaaaatgctcatgccagttaatgccaggaaaaaaatcaccgacacactactagtactttgttcctgttgtatgcattctcctaggtagagcctccatcttcagttgtgtttgtgaaggtattttttgctttttaaatactggggaccgatatcactgttgatagtgcagagaaaccctccacatttttcagtgcataattgagttttctataaatgccttcgtgttttctgagcagaatgtacgaggtgtgccatcccaaaaccagctgctaccctgtccttttaatgtaagtcactccccttcactgtggcctcgctgatgtctgataagtattgtcagtgtgcaaaaggctttacttcagaatggtttatttatagcaaactaagttgaaaattttagaaacagtctttgtgggtggatgttattaactgtcattgttgttgcccagagccatgggttttttaaccccaaattatccacatggtgtgtattatgaattctttgaactcttaaggtttttgtgagaaaaggactgtgaattcaaaacaataaggcacttgtgggtgcactacatagattctgacagtgttgtgattctgtataggatttttaaaaatgacaacattcacaaaatttattactttttaaaaaataacatgcctattaactggttgcactgatataaaagaaatatatttgtgttttgtttgtactaaaatgcaaaagcaagagtgcaatttttaaaatctagaagttaggggttttgttggagaaaaatggactgatctttaaactattcagtcttactgggatttttatgcatagaaactcacatataaacatgaaataaacagtgccagtattcataggaaagtgagaaactgtaatatttggccattattctattcaacaggttttagaggcacgccaccattttttccttatatttttgcttaatttttttaaattgtcatttaattcttaaactgtcatttatttgagatggaaataagatctaaagttagttgcctttgcctgtaaaacatgtgatttgcaaattattattttcctttttttttaacaaatggaagtaaatttgtttcacgtaaatcttaattttcaacctttctggataccttaattgtaactgtcagtttgcactggtcggtatatggaaacacattgctctaccctgctacttagttgattttaaagtgaatttacagtgatgagaaatttgtgaaaaatatattgtatttcttttgatgtttcaaaaggttgcctatgaaaaactgatttgttaaaacatgctacatgtccaaaaataaagaccagaatgacattttgataaaaaaaaaaaa

SEQ ID NO: 3 - DNA, 1232 bp, Homo sapiens
  CDS (159)..(776)
gggccgcctctccttccgccggtgccgcggcgcctcatggaagccccggagggcggcggaggggggcctgcagcgcggggcccggaggggcagccggcgcccgaagccagggtgcacttccgagtggcgaggttcatcatggaggtgtcaagctagggatgcggtccattcccattgccactgcttgcaccatttaccataagttcttttgcgagaccaacctggacgcctatgacccttacctgattgccatgtcttcaatttacttggccggcaaagtggaagagcagcacctgcggactcgtgacatcatcaatgtgtccaacaggtactttaacccaagcggtgagcccctggaattggactcccgcttctgggaactccgggacagcatcgtgcagtgtgagcttctcatgctgagagttctgcgcttccaggtctccttccagcatccacacaagtacctgctccactacctggtttccctccagaactggctgaaccgccacagctggcagcggacccctgttgccgtcaccgcctgggccctgctgcgggacagctaccatggggcgctgtgcctccgcttccaggcccagcacatcgccgtggcggtgctctacctggccctgcaggtctacggagttgaggtgcccgccgaggtcgaggctgagaagccgtggtggcaggtgtttaatgacgaccttaccaagccaatcattgataatattgtgtctgatctcattcagatttataccatggacacagagatcccctaaggtcctggcccaggcctgcccaaagagaagcccaggatggtcggctgcctggggacattgtcaccacgtcgccatgacggctggtccccacaggaccagctgggaggactggttgtgctgctggagaagggctggagaaggcaatggcatgctgccgctttgccagtccctagaagtcgcggtgcaggtgatggtgggagccgcgcctccagcgggcaggccgggagtgtactgtgtgcagctgacccaaggcagccacatctgcgtttgtcctttgagaggactttgactacaatacaggcatgacatcaatgaaaggaaagtcatgaaatcgatgagactgaatccctacggatttcttaaaagccagatttgtagggagaatgaatgtgcaacgtggctgaaatctattttgtgtaataaaaggtgatacaagtcaaaaaaaaaaaaaaa

SEQ ID NO: 4 - DNA, 2353 bp, Homo sapiens
  CDS (386)..(1780)
atccgggcccttccagaagcaacccaggagccccgagacctgcagggatgtgtgcaccctgacccctgacgcatagccctgcacctgcagccagctggcctcgggcttgaaaacatggcgggtgcgctccaattcacggtggtttccaagcgcattctggaggagaaaacacatgagtgtgtggtcagggttctctgccgacagacctaccgtggggaagaaagagaagttctgaagatggatcatggccgtgactgcatgtcaaggagaatctccatgatgacacggaggcctacgtcgagatagagtaaatatggtccaattaaaaggtgacccgacaatcaacccctgaaaaaggcggtcataaaacccccaggagacgaagatgatggcacgtcgtgaccccaaacctggggcaaagagactggtgagagcccagaccctccagaagcagcggagggccccagttgggccaagggctcccccgcccgatgaagaagatcccaggctcaagtgcaaaaactgtgaggcctttggccacacggccagaagtaccaggtgccccatgaagtgctggaaggcagccctggttccaccgaactttggggaaaaggaagggaaggaaaacctgaaaccatggaagccccaggttgaagcgaaccctgggcccttgaacaaggataagggagagaaggaagagagaccaaggccacaagacccgcagaggaaggctctcctccacatattttccgggaaacctccagagaagccgctgccaaatcaaaaaggatccacggaatcttctgattatctgagggttgcaagcgggccaatgccggtccacacaaccagtaagaggccgcgtgtggaccctgtcctctctgatcgctcagctaccgaaatgtctgacaggggctccgtcttagcttcactgtctcccctcagaaaagccagtctgagctcctcctcaagtcttggaccaaaggaaagacagacaggggctgcggccgacatccctcagactgcagtcaggcaccagggccccgagcctctcctcgtggtgaagccgacacacagcagccctgagggtggctgtcgagaagttccccaggctgcctccaaaacccacggcctgctccaggccgtcagaccccaggcacaagacaaacgtcctgcggtgacctcacagccctgcccaccagccgccacacacagcttgggcctaggctccaatctcagcttcgggccaggagccaagagatctgccccggctccgattcaggcttgcctgaacttccccaagaaaccgagactgggtcccttccagatccccgaaagcgccatccagggaggtgagctgggggccccggagaatctccaacctccgccagccgcaaccgaacttggaccacgtaccgtgtcaccccagataggcacgaggacacccgcccaggtgcttagcggcgaccggcagcctccgcacagcagaccttgcctgcctactgcccaggcctgcaccatgtcccatcacccagcggccagccatgatggggcccagcctctcagagtgctctttcggagactggaaaacggacgctggagctccagcctgctgacggccccctcatttcactctcctgagaagccgggagccttcctcgctcagagccctcatgtctcagagaagtctgagggtccctgtgttcgtgtcccaccaagcgtcctctatgaggaccttcaggttccctcctcctcagaggacagcgattctgacctggagtgagactgcaggtggcaggggctccttggcctccagctcccgtgacttggaggggactgtgggactgaggagcacagagcagagagcagactctgtgcggtgactccgaagctccccggctgtggcccttctgtggatgtgggagcccaggccaggcagggagcagatgcagggactctgccccgttgaattctggtgagggacattgtagttcgcatggttctctggaaacgcgccaggaaaagcttccgtgccagtgattcgttgcctcagaaactgcatgacgcgcaggagtcagacttccgctgggacgtcaataggaaacgggggaattactgtgtatttgctctctagacgactgaataagggaaaagttagggaaccctgagaggtgcagcccttccgctgtgccccgccctgagagcagtgtttccgacgctgggaagcgcgctgtgcaaagcgctctcggggtctttcctcagcctcgaaaagtgggctctggaatccctttgtaaataggtgtgttgaatttgttttgaagtgaataaaattctcaaaaagaaaaaaaaaaaa

SEQ ID NO: 5 - DNA, 897 bp, Homo sapiens
  CDS (1)..(894)
atggagggatattccaacaagaaattggataatatgtctttggatgatgctgtttgccaaggcactgcgggcaggaaaggcaaacgaagaatgaggtacgcaggcaactggagggtgaacaagatgaagaggagctttattgagtgttacaacagcttagaggagacccacaggaggacggcggacctgctctccgtggtcatggcccagcagaggggaagcgcagctcagtgtccaagttacacagactcgcagaatctcacaggtgtcttagaatttctcttcctgggactctcagaggatccagaactgcagcccgtcctcgttgggctgttcctgtccatgtacctgatcacggtgctggggaacctgctcatcatcctggccgtcagctgtgactcccacctccacacccccatgtacttcttcctctccaacttgtccttggctgacatcggactcacctctgccaccatccctaagatgattgttgatatgcaatctcacagcagaatcatctcctatgagggctgcctgatgcagatgtctttatctattttgaagggtgcggtcacctcagtgatgtacactgtggtcatccctatgctgaaccccttcatctacagcctgagaaacagggacattaaaatctccaagatgattgtggacatccagtctcacagcagagtcatctcctatgcgggctgcctgactcaggtatctctttttgccgtttttggatgcatggaagacatgcttctgagtgtgatggcttatgaccgaaaaggtgcagtggcctcagtgatgtacacggtggttactcccatgctgaaccccttcatctacagcctaacagggaaattaaaagtgccctgcggcagctgcactgcagaatag

SEQ ID NO: 6 - DNA, 2706 bp, Homo sapiens
  CDS (123)..(1682)
ccgagccctgctcatggcagtgaggtgggctcccagctgctgaggccacccagcactagtgagtgacttggcatttttatttttgttcagatcacaagaatgggcattacatcatcccacagatggctgacagatctcggcaaaagtgcatgtctcagagccttgacttatccgaattggccaaagctgctaagaagaagctgcaggcgctcagcaaccggctttttgaggaactcgccatggacgtgtatgacgaggtggatcgaagagaaaatgatgcagtgtggctggctacccaaaaccacagcactctggtgacagagcgcagtgctgtgcccttcctgcctgttaacccggaatactcagccacgcggaatcaggggcgacaaaagctggcccgctttaatgcccgagagtttgccaccttgatcatcgacattctcagtgaggccaagcggagacagcagggcaagagcctgagcagccccacagacaacctcgagctgtctctgcggagccagagtgacctcgacgaccaacacgactacgacagcgtggcctctgacgaggacacagaccaggagcccctgcgcagcaccggcgccactcggagcaaccgggcccggagcatggactcctcggacttgtctgacggggctgtgacgctgcaggagtacctggagctgaagaaggccctggctacatcggaggcaaaggtgcagcagctcatgaaggtcaacagtagcctgagcgacgagctccggaggctgcagcgagagatccacaagctgcaggcggagaacctgcagctccggcagcctccagggccggtgcccacacctccactccccagtgaacgggcggaacacacacccatggcgccaggcgggagcacacaccgcagggatcgccaggccttttccatgtatgaacctggctctgccctgaagccctttgggggccaccttggggacgagctcactacgcggctgcagcctttccacagcactgagctagaggacgacgccatctattcagtgcacgtccctgctggcctttaccggatccggaaaggggtgtctgcctcagctgtgcccttcactccctcctccccgctgctgtcctgctcccaggagggaagccgccacacgagcaagctttcccgccacggcagtggagccgacagtgactatgagaacacgcaaagtggggacccactgctggggctggaagggaagaggtttctagagctgggcaaagaggaagacttccacccagagctggaaagcctggatggagacctagatcctgggcttcccagcacagaggatgtcatcttgaagacagagcaggtcaccaagaacattcaggaactgttgcgggcagcccaggagttcaagcatgacagcttcgtgccctgctcagagaagatccatttggctgtgaccgagatggcctccctcttcccaaagaggccagccctggagccagtgcggagctcactgcggctgctcaacgccagcgcctaccggctgcagagtgagtgccggaagacagtgcccccagagcccggcgccccagtggacttccagctgctgactcagcaggtgatccagtgcgcctatgacatcgccaaggctgccaagcagctggtcaccatcaccacccgagagaagaagcagtgacctctctccccacaccctcacctgcaccctaggacctcactggccataggagctgggccactccagacattaatccccaccccaacagagccactggcacaagtgcccttagtgctgccacactccctggcagccaggtgccctggtgcccacccctgtcgagcccctaaggatggggaggtgggggggcaggagcttctgtcccccacattccatgcacctcccctctgtatatagcatctcccccctcctagtgagcaggggcctgcaaggcatcactcccagcccctcgccttctagggcaccctcagcaaaggggcaggtggggacactccaagtggggcagctctccgtacatgcgccccacccccatgagccagttcagccctactgggggctgagcgggggcatcccctcctttgtacatagtctccatggatgtccctgccctgtagccaccagccccttgctgctctccctttaatgccatatggcccctgcctagggcacaggccccaacctgtgtgctggggtccccagcagcaaacactggaaagtctgttttttttttttctttcttcttccccaccccttaattttaactttgtggtaactgagtgcccccgcgtgcctgcgtgttgagtgtgtggggcggcagtgccgttccggaggcctggtccatctggagttttgaggggtgaggggaccagagcagtgggaccagcatggggatcagcttcccttccccacctgggagccagggactgtccgggtagccagttttggtcctgccagctgcctccctgatccctccccactctcgccccttctctatgaacttaaatcaaaaaccacttccctccatctcctcctgctcctgcgtggagggggaatgtgtgctggctaaggtggaggactgagcagctgagcctggggctggctccccgggggtctcgactcagctggtggcttttgaactgagtccctcccgtaaactcttcaagccagcaccaccataatt

SEQ ID NO: 7 - DNA, 1080 bp, Homo sapiens
  CDS (178)..(1077)
atgttcaaagccatccttggccatgtgtggcccaaagaccatgggttggacaagcttgttgtaaggtgtccaagacacacagagccatggaatctcacaggtatctcagaattcctcctcctgggactctcagaggatccagaactgcagcccgtcctccctgggctgtccctgtccatgtacctggtcacggtgctgaggaacctgctcatcatcctggctgtcagctctgactcccacctccacacccccatgtgcttcttcctctccaacctgtgctgggctgacatcggtttcacctcggccatggttcccaagatgattgtggacatgcagtcgcatagcagagtcatctcttatgcgggctgcctgacacagatgtctttctttgtcctttttgcatgtatagaagacatgctcctgacagtgatggcctatgaccgatttgtggccatctgtcaccccctgcactacccagtcatcatgaatcctcaccttggtgtcttcttagttttggtgtcctttttcctcagcctgttggattcccagctgcacagttggattgtgttacaattcaccttcttcaagaatgtggaaatctccaattttgtctgtgacccatctcaacttctcaaccttgcctgttctgacagtgtcatcaatagcatattcatatatttagatagtattatgtttggttttcttcccatttcagggatccttttgtcttacgctaacaatgtcccctccattctaagaatttcatcatcagataggaagtctaaagccttctccacctgtggctctcacctggcagttgtttgcttattttatggaacaggcattggcgtgtacctgacttcagctgtgtcaccaccccccaggaatggtgtggtggcatcagtgatgtacgctgtggtcacccccatgctgaaccctttcatctacagcctgagaaatagggacattcaaagtgccctgtggaggctgcgcagcagaacagtcgaatctcatgatctgttatctcaagatctgctccatcctttttcttgtgtgggtgagaaaggtcaaccacattaa

SEQ ID NO: 8 - DNA, 1062 bp, Homo sapiens
  CDS (1)..(1059)
atggcttttatcgtgcccgatgttaatgcacgttcttttttgacaataaattcatggccatcagataatatcaatttgacatacacggcatcagggccttcacagccaccatacatcagctacatggaagcaggaaaccaaacaggatttttagagtttatccttctcggactctctgaggatccagaactacagccgttcatatttgggctgttcctgtccatgtacctggggacggtgctgggaaacctgctcatcatcctggccatcagctctgactcccacctccacacccccatgtacttcttcctctccaacctgtcctgggttgacatctgtttcagcacttgcatcgtccccaagatgctggtgaacatccagaccgagaacaaagccatctcctacatggactgcctcacacaggtctatttctccatgttttttcctattctggacacgctactcctgaccgtgatggcctatgaccggtttgtggctgtctgccaccctctgcactatatgatcatcatgaacccccacctctgtggcctcctggtttttgtcacctggctcattggtgtcatgacatccctcctccatatttctctgatgatgcatctaatcttctgtaaagattttgaaattccacattttttctgcgaactgacgtacatcctccagctggcctgctctgataccttcctgaacagcacgttgatatactttatgacgggtgtgctgggcgtttttcccctccttgggatcattttctcttattcacgaattgcttcatccataaggaagatgtcctcatctgggggaaaacaaaaagcactttccacctgtgggtctcacctctccgtcgtttctttattttatgggacaggcattggggtccacttcacttctgcggtgactcactcttcccagaaaatctccgtggcctcggtgatgtacactgtggtcacccccatgttgaaccccttcatctacagcctgaggaacaaggatgtgaagggagccctggggagtctcctcagcagggcagcctcttgtttgtga

SEQ ID NO: 9 - DNA, 1297 bp, Homo sapiens
  CDS (225)..(1088)
gaactcggcacgaggcggcccaggagaagcagttcctgccggcgctgctgagtttcttcatctacaacccgcgcttctggccgcgggaaggagaggttgttcggaatcctataattgaaaaacagtaaagatggaaaaccagttattgaatatcaagaggaggagttgttgaagtctcaggggatccagaactgcagccagtccttgctgggctgttcctgtccatgtgcctggtcacggtgctggggaacctgctcatcatcctggccatcagccctgactcccacctccacacccccatgtacttcttcctctccaacctgtccttggctgacatcggtttcacctccaccacggtccccaagatgattgtggacatgcaaactcacagcagagtcatctcctatgaaggctgcctgactcagatgtctttttttgtcctttttgcatgtatggatgacatgctcctgagtgtgatggcctatgaccggtttgtggccatctgtcaccccctgcactaccgaatcatcatgaacccacgcctctgtggcttcttaatcttgttgtctttttttattagtcttttggactcccagttgcacaatttgattatgttacagctcacctgcttcaaggatgtggacatttctaatttcttctgtgacccttctcaactcctccaccttaggtgttccgacaccttcatcaatgaaatggtcatatatttcatgggtgccatatttggctgtctccctatctcagggatccttttctcttactataaaattgtttcccccattctgagagttccaacatcagatgggaagtataaagccttctccacctgtggctctcacctggcagttgtttgcttattttatggaacagggcttgtagggtacctcagttcagctgtgttaccatcccccaggaagagtatggtggcttcagtgatgtacactgtggtcacccccatgctgaaccccttcatctacagcctgaggaacaaggacattcaaagtgccctgtgcaggctgcatggcagaatcatcaaatctcatcatctccatcctttttgttatatgggatagaaatggcagcaaaatttaacacctaggcctgcaaattctgcctccttggtcacattattttggttgcttgatggctttcattcctctctgggtttcgtatgtgaatattgcttgctttgttttgtctttaattgcaatgggtgagtattctggtatcctttgttcatcatacacatcatgaatgattccaatataaaaaaaaaaaa

SEQ ID NO: 10 - DNA, 1535 bp, Homo sapiens
  CDS (1)..(1335)
atgaaccgcaccggggcatgtcgacttcaaggggctggtgggccgtccctgtccttggagactcctctctgcctcaattgctctgtcctccctggagacctgtacccagggggtgcaaggaaccccatggcttgcaatggcagtgcggccagggggcactttgaccctgaggacttgaacctgactgacgaggcactgagactcaagtacctggggccccagcagacagagctgttcatgcccatctgtgccacatacctgctgatcttcgtggtgggcgctgtgggcaatgggctgacctgtctggtcatcctgcgccacaaggccatgcgcacgcctaccaactactacctcttcagcctggccgtgtcggacctgctggtgctgctggtgggcctgcccctggagctctatgagatgtggcacaactaccccttcctgctgggcgttggtggctgctatttccgcacgctactgtttgagatggtctgcctggcctcagtgctcaacgtcactgccctgagcgtggaacgctatgtggccgtggtgcacccactccaggccaggtccatggtgacgcgggcccatgtgcgccgagtgcttggggccgtctggggtcttgccatgctctgctccctgcccaacaccagcctgcacggcatccggcagctgcacgtgccctgccggggcccagtgccagactcagctgtttgcatgctggtcccgccacgggccctctacaacatggtagtgcagaccaccgcgctgctcttcttctgcctgcccatggccatcatgagcgtgctctacctgctcattgggctgcgactgcggcgggagaggctgctgctcatgcaggaggccaagggcaggggctctgcagcagccaggtccagatacacctgcaggctccagcagcacgatcggggccggagacaagtgaccaagatgctgtttgtcctggtcgtggtgtttggcatctgctgggccccgttccacgccgaccgcgtcatgtggagcgtcgtgtcacagtggacagatggcctgcacctggccttccagcacgtgcacgtcatctccggcatcttcttctacctgggctcggcggccaaccccgtgctctatagcctcatgtccagccgcttccgagagaccttccaggaggccctgtgcctcggggcctgctgccatcgcctcagaccccgccacagctcccacagcctcagcaggatgaccacaggcagcaccctgtgtgatgtgggctccctgggcagctgggtccaccccctggctgggaacgatggcccagaggcgcagcaagagaccgatccatcctgagtggagccttaaagtggcttcacctggaggggccagagggtcacctggagctggggagacacatctgccttcctctgcagggatgccttcacgtactgtccctagttcagcctagaaattctgaccagcacctcagtttccctcagagggaaacagcaggaggagggatccctgactgctgaggactcacactgacc

SEQ ID NO: 11 - DNA, 1539 bp, Homo sapiens
  CDS (130)..(1536)
gcacgaggtggaggacgcggctgcttcaagtccttggctctgatccaggccacagattccaggattctacaggcaggaaacatcttagaaatcagggttgggcaggcaggagccaggagagtagctacaatgacttcaccagtactggtggacatacgagaagaggtgacctgccctatctgcctggagctcctaacagaacccctgagcatagactgtggccacagcttctgccaagcctgcatcacaccaaatggcagggaatcagtgattggtcaagaaggggaaagaagctgccctgtgtgccagaccagctaccagccagggaacctgcggcctaatcggcatctggccaacatagtgaggcggctcagagaggtagtgttgggccctgggaagcagctgaaagcagttctttgtgcagaccatggagaaaaactgcagctcttctgtcaggaggatgggaaggagaagtttcaggagtctctaaagaagctgaagaacgaggagcaggaagctgagaagctaacagcttttatcagagagaagaagacatcctggaaggcaagggagactttttctgaagatgtcctggggcaggaatcatggcagagtacaaatgcaagggaaaatgcagggatcccagggctggaggctgcccacttctggattgccatccctttctgtgccatgtatcttgtagcactggttggaaatgctgccctcatcctggtcattgccatggacaatgctcttcatgcacctatgtacctcttcctctgccttctctcactcacagacctggctctcagttctaccactgtgcccaagatgctggccattttgtggctccatgctggtgagatttcctttggtggatgcctggcccagatgttttgtgtccattctatctatgctctggagtcctcgattctacttgccatggcctttgataggtatgtggctatctgtaacccattaaggtatacaaccattctcaaccatgctgtcataggcagaattggctttgttgggctattccgtagtgtggctattgtctcccccttcatcttcttgctgaggcgactcccctactgtggtcaccgtgtcatgacacacacatactgtgagcatatgggcatcgcccgactggcctgtgccaacatcactgtcaatattgtctatgggctaactgtggctctgctggccatgggactggattccattctcattgccatttcctatggctttatcctccatgcagtctttcaccttccatctcatgatgcccagcacaaagctctgagtacctgtggctcccacattggcatcatcctggttttctacatccctgccttcttctccttcctcacccaccgctttggtcaccacgaagtccccaagcatgtgcacatctttctggctaatctctatgtgctggtgcctcctgtactcaatcctattctctatggagctagaaccaaggagattcggagtcgacttctaaaactgcttcacctggggaagacttcaatatga

SEQ ID NO: 12 - DNA, 745 bp, Homo sapiens
  CDS (48)..(632)
gggctgcagcggggtgagcggcggcagcggccggggatcctggagccatggggcgcgcgcgcgacgccatcctggatgcgctggagaacctgaccgccgaggagctcaagaagttcaagctgaagctgctgtcggtgccgctgcgcgagggctacgggcgcatcccgcggggcgcgctgctgtccatggacgccttggacctcaccgacaagctggtcagcttctacctggagacctacggcgccgagctcaccgctaacgtgctgcgcgacatgggcctgcaggagatggccgggcagctgcaggcggccacgcaccagggctctggagccgcgccagctgggatccaggcccctcctcagtcggcagccaagccaggcctgcactttatagaccagcaccgggctgcgcttatcgcgagggtcacaaacgttgagtggctgctggatgctctgtacgggaaggtcctgacggatgagcagtaccaggcagtgcgggccgagcccaccaacccaagcaagatgcggaagctcttcagtttcacaccagcctggaactggacctgcaaggacttgctcctccaggccctaagggagtcccagtcctacctggtggaggacctggagcggagctgaggctccttcccagcaacactccggtcagcccctggcaatcccaccaaatcatcctgaatctgatctttttatacacaatatacgaaaagccagcttgaaaaaaaaaaaaa

SEQ ID NO: 13 - DNA, 2938 bp, Homo sapiens
  CDS (385)..(2280)
gtgctgcctggcgctggctaggaggcaaacgcacgcgggaagagctgctacccattccagggaccctgccgctgcccctctgaggggtctgcacctcctgggagcaggtgggtctctgggacgagggtccatggtggatggctctggagacgctcccgaggctgtgccgtcccgctgctgcacaggtcggagggtcaccgcagaggctactcgggctggggctggggccgagggagcccgcactggagccccatgtggaacccaaggatgcagctgctctgctaacacggcagcccatccttcgagactgtgacctcgccacagtggccctcagccctccacctccggcgggggcgagggccacccacctccaagtctccagccatgacgacctccgcactccggcgccaggtgaagaacatcgtgcacaactactccgaggcagaaatcaaggtgcgcgaggccaccagcaatgacccctggggcccccctagttcgctcatgtccgagatcgctgacctgaccttcaacacagtggccttcaccgaagtcatgggcatgctgtggcggcggctcaatgacagcggcaagaactggcggcacgtgtacaaggctctaacattgctggactacctgctcaagacgggctccgagcgggtggcccaccagtgccgcgagaacctctacaccatccagacactcaaggacttccagtacatcgaccgcgacggcaaggaccagggcgtcaacgtgcgcgagaaggtcaagcaggtgatggccctgctcaaggatgaggagcggctgcggcaggagcgaacccacgccctcaagaccaaggagcgcatggcactggagggcatcggcattggcagtgggcagctgggcttcagccgccgctacggcgaggactacagccgctcccggggctccccgtcctcctacaactcctcctcttcgtcaccccgctatacctccgacctggagcaggcccggcctcagacgtcaggggaagaggaactgcagctgcagctggccctcgccatgagccgtgaggaggcagagaagcctgtccccccagcctcccacagggacgaggacctgcagctgcagctggctctgcgcctgagccggcaggagcacgagaaggaggtgaggtcctggcagggtgatggctcccccatggccaatggtgcaggggccgtggtccaccatcagcgggacagagagcctgagagagaggagagaaaggaggaggagaagctaaaaaccagccagtcctccatcctggacttggctgacatcttcgtacctgccctggccccgccctccacacactgctctgctgacccatgggacatcccaggttttaggccgaacacagaggccagtggatcctcctgggggccttctgcagacccctggtctccgatcccctcaggaaccgtcctgtcccgaagccagccctgggatctgactcccatgctctcctcctctgagccctggggcaggaccccagtgctgcctgctgggccccccaccacagacccctgggccctgaactctccccactacaaactccccagcactggggctgacccttggggagcctccctggagacctccgacacacctggtggtgcctcgacctttgacccatttgccaaacctccagaatccacagagaccaaggaggggctggagcaggccctgccctctgggaagcccagcagccctgtggagctggacctgtttggagaccccagccccagttccaagcaaaatggcacgaaggagccagatgccctggacctgggcatactaggggaagcactaacccagccaagcaaagaggcccgagcttgccggactcccgagtccttcctgggtccctcagcttcctccttggtcaaccttgactcgttggtcaaggcaccccaggttgcaaagacccggaaccccttcctgacaggtctcagcgctccgtcccccaccaacccgttcggcgcgggcgagacgggcaggccgacgctaaaccagatgcgcaccggctcgccggcgctgggcctggcaggcgggcctgtgggggcgcccctgggctccatgacctacagcgcctctctgcccctcccgctcagcagcgtgccagctggcttgaccctccccgcctcggttagcgtcttcccgcaggccggagccttcgcaccgcagccgctgctgcccacgccgagctcagccgggccgcggcccccgcccccgcagaccggcaccaaccccttcctctgagccccgccccgtcccataccggcctgcgcctgcgccggacgctccgcggccccgcctccggacccggggctgggcggggcgccggtgctagtggaacgccgagccagtggcggctggtatcccgcggcggctctggaagctggacgcggaccacggcccgggagctagaaactgaacgcccgcataataaagactggaaccctcgttctcagctctcaccaagtggactttttgcggggtgtggcggccgggtctcgaccacagcgtggatcaccggctgtttaggaaactgcagctgcacaacgtggggtgcaaaactgccccgcttcctttacagctcttctcaaccctcacctccatcccccgtcacccaggcaccttcgcttccagatgctgccaggctgtcactcaattcggtcatttcattcatttatcacacatgggcactggggttgggctaacagcaagagacaataggcctttgttcctatttattgggtactgcttacgtgctaagcagatcagtttatttaatgcttgcaacgactctctgaggtagaaaatattgttaattccgttcaggatcccggctacataatctgtggggctcaatacaaaataaaaatgtaggggctccttgttcaaaaaaaaaaaa

SEQ ID NO: 14 - DNA, 869 bp, Homo sapiens
  CDS (353)..(679)
gctttttattcttattggggctttagcacataatttgaggatctttttggcttactctgtcagtagctgctaagctattttgtgattcctgaaactattgctttgataccagcactggacacttaaaactctcttcagctgtgctctgtgtggtttgtgattatacttcttgcctgaatttccaaatcttgatgacattttatttataaaaatataattaactagttatcagagtacttaccatttcttagtatcatagaaccactggactatagcttattgaattataaaggggtcttgaagatactttagtgagttccaatcccagatcccaccaagttagcaaaggagaatgatgtgctgttttcaaaaattcaaaatcctaatgaatactccaaatgtactcatgttaaaactacatagaaatgccaactgtgggctaccctctttgggtcacctccctttgtatgggagctctgttttcactctattaaatcttgcaactgcactgtcttctggtccatgtttgttactgctcgagatgagctttcgccccccgtccaccactgccgtttgctaccgtggcagacctgccgctgacttccaaccctccagatccagcagggtgtccgctgtgctcctgatccagcgaggcgcccattgctgctccaaatcgggctaaaggcttgccatcattcctgcacggttaagtgcccgggttggtcgtaatcgagctgaacacttgtcactgggttccacggttctcttccgtgacccatggcttctaatagagctataaaactcaccgcatggcccaagattccattctttggaatacgtgaggccaagaaccccaggtcagagaacac

SEQ ID NO: 15 - DNA, 1491 bp, Homo sapiens
  CDS (136)..(1488)
gcagtcgcggcctcgagtgcggtccgcctcactcccgccgcgaacgcgcctcccctctgggtcccaggcgccatcggcagcccatcccaagaggctgtcagacctccttctaacttcacgggcagcagcccctggatggagatctccggacccccgttcgagattggcagcgcccccgctggggtcgacgacactcccgtcaacatggacagccccccaatcgcgcttgacggcccgcccatcaaggtctccggagccccagataagagagagcgagcagagagacccccagttgaggaggaagcagcagagatggaaggagccgctgatgccgcggagggaggaaaagtaccctctccggggtacggatcccctgccgccggggcagcctcagcggataccgctgccagggcagcccctgcagccccagccgatcctgactccggggcaaccccagaagatcccgactccgggacagcaccagccgatcctgactccggggcattcgcagccgatcccgactccggggcagcccctgccgccccagccgatcccgactccggggcggcccctgacgccccagccgatcccgactccggggcggcccctgacgccccagccgatccagatgccggggcggcccctgaggctcccgccgcccctgcggctgctgagacccgggcagcccatgtcgccccagctgcgccagacgcaggggctcccactgccccagccgcttctgccacccgggcagcccaagtccgccgggcggcctctgcagcccctgcctccggggccagacgcaagatccatctcagaccccccagccccgagatccaggctgccgatccgcctactccgcggcctactcgcgcgtctgcctggcggggcaagtccgagagcagccgcggccgccgcgtgtactacgatgaaggggtggccagcagcgacgatgactccagcggagacgagtccgacgatgggacctccggatgcctccgctggtttcagcatcggcgaaatcgccgccgccgaaagccccagcgcaacttactccgcaactttctcgtgcaagccttcgggggctgcttcggtcgatctgagagtccccagcccaaagcctcgcgctctctcaaggtcaagaaggtacccctggcggagaagcgcagacagatgcgcaaagaagccctggagaagcgggcccagaagcgcgcagagaagaaacgcagtaagctcatcgacaaacaactccaggacgaaaagatgggctacatgtgtacgcaccgcctgctgcttctagggagaaaagtggtgccgagcgacactgagggtcgtttccggctggacaggccagcgccagcaaccgtaagctggacaggcaggggcttcagcgtttcctcacttctcattcgttcgccaaaccctcccgcctttacagttgaaaaaccagacacacaggtgctggagaatctggtaaaagcaccattgtga

SEQ ID NO: 16 - DNA, 1888 bp, Homo sapiens
  CDS (450)..(1838)
ccaaaagggtggcggcgccagctttgtctcagcgaaggccacagcattgcgggcagctgccgcataaaacctcggctccccctgactttgcacccgacacttcacttgcaacgcaatcagaaggagaaggcaccgcatcccttcggccccgcgcggccgaaagcctcgcgcccaagactccccggcatcctagcgcgctggctgcaaaagagggggaaacgcctccgcgtcccttccaacagtaccggagagggagaggggcgtggctgagactagccccgaccacgcgcgcgcggcccctcggcatccggcacaacacaacaaaatggctgccgcgccgctgggcccctgaggaaagagcccgaacttctcccgctctacctcagcctgcgggactgctcggctcggcttctaggcggttttgatgaacacctggctttattcttgcaatgaagaaaggttctcaacaaaaaatattctccaaagcaaagataccatcatcatctcactctcctatcccatcatctatgtccaatatgagatctaggtcactttcacctttgattggatcagagactctaccttttcattctggaggacagtggtgtgagcaaattgagattgcagatgaaaacaatatgcttttggactatcaagaccataaaggagctgattcacatgcaggagttagatatattacagaggccctcattaaaaaacttactaaacaggataatttggctttgataaaatctctgaacctttcactttctaaagacggtggcaagaaatttaagtatattgagaatttggaaaaatgtgttaaacttgaagtactgaatctcagctataatctaatagggaagattgaaaagttggacaagctgttaaaattacgtgaactcaacttatcatataacaaaatcagcaaaattgaaggcatagaaaatatgtgtaatctgcaaaagcttaaccttgcaggaaatgaaattgagcatattccagtatggttagggaagaagttaaaatctttgcgagtcctcaatttgaaaggcaacaagatatcatcgctccaagatataagcaagttgaaactgcttcaagatttgatttctctgatcctagttgaaaatccagttgtgacccttcctcattacctccagtttaccattttccacctccgttcattggaaagtttggaaggtcagccagtaaccactcaggatagacaggaggcttttgagagattcagtttagaagaggtagaaagactggaaagagacctagaaaaaaagatgatagaaactgaagagcttaagagcaaacaaacaaggttccttgaggaaattaaaaatcaagataaattgaataaatcattaaaagaggaggccatgttacagaaacagagctgtgaggaactcaagagtgacttaaacacaaaaaatgaattgctaaaacagaagaccatagaattaacacgagcatgtcagaagcaatatgagctggaacaggaattggccttttataaaattgatgctaaatttgagccactaaattattatccatcagagtatgctgaaattgataaagccccagatgaaagcccttacattggcaaatccagatacaagagaaatatgtttgccacagagagttatattattgacagtgctcaggcagtacagatcaagaagatggagccagatgaacaacttagaaatgatcacatgaacttgagaggccacacaccactggacacgcaactggaagacaaaaaaaaaaaaaataagtacagatcaagaagatggagccagatgaacaacttaaaaatgatcacatgaacttgagaggccacacaccactggacacgcaactggaaaactgtatt

SEQ ID NO: 17 - DNA, 2157 bp, Homo sapiens
  CDS (1)..(1017)
atgaacggctacggctccccctacctgtacatgggcggcccggtgtcgcagccgccacgggcgcccctgcagcgcacgcccaagtgcgcgcgctgccgcaaccatggcgtcctgtcctggctcaagggccacaagcgttactgccgcttcaaggactgcacctgcgagaagtgcatcctcatcatcgagcggcagcgggtcatggctgcgcaggtggcgctgcgccggcagcaggccaacgagagcttggagagcctcatccccgactcgctgcgcgctctgccagggcccccgccgccgggggacgccgtcgccgccccgcagccgccgccagcctctcagccgtcgcagccgcagccgccgcgccctgctgccgagttggccgcggccgccgcgctgcgttggactgccgagccgcagcccggggctctgcaggcgcagctcgccaagccagatttgactgaagaacgacttggagacggcaagtcggcagacaatacagaggtcttcagtgacaaagacactgaccagaggagttccccagatgtggcaaagagtaagggctgcttcacccctgagagccctgagatagtgtccgtggaggaagggggatacgctgtccagaaaaacggaggcaaccccgagagccgccctgacagccccaagtgtcacgcggagcagaatcacctcctgattgagggcccctcggggactgtttctctgcccttcagcttgaaagccaacagaccgccgcttgaagtgttaaaaaagatattccccaaccagaagccaacggtgcttgagctcatcctcaagggctgtggcggggacctggtgagcgccgtggaagtccttctgtccagccgatcctcagtcacgggagcagagcgaacttccgcagaacctgagagtctagcgttgccctccaatgggcacatctttgaacacaccttgagctcctaccccatctcgtcttccaatggtctgtgggatcagcctttcgagtcccagacacgttgaggttttctgccgactctagcaacgttgtccccagtcccttggctgggcctctgcagccccctttcccccagccaccccggtacccgctgatgctgaggaatactttggcgagaagccagtcgagcccctttttgcccaatgatgtcaccctgtggaacaccatgacgctgcagcagcagtatcagctgaggtcccagtatgtcagtcctttccccagtaactctaccagcgtcttcagaagctcgcccgtccttcctgcccgcgccacggaagaccctcggatttccatccctgatgatgggtgtccatttgtgtcaaagcagtccatttacaccgaggacgactatgacgagaggtctgactcctcagactctagaacactcaacacatcatcttaaagtggtgctggatgggtggtggccaggtgacattttctgtgcgttttgaccctgaggcatctgaggagaggccacatcttgtgtatgccctttccttctgtttgacaaggtgactgtgcttgattctatacattagcaataaaaacataacttatttaacttcttgcacttcactggaaaatgccaaatagctctgttctgtggctttagtgctgaatgtttattgtaaaagagagtctaatgttaagaatagtcttgggaaggctgggtccgtggaagatttatttggggatgtaaagctgaaggtcagccttgcacctaaacccaacctggaatgttaaatgaaataatatacttgaatgcaattttgtaaaagtggattcctcaggatatgtgaaacctaaaggaagtggttctgttgcaaatggactataaacagggacattatattcttacactaaaaatccttgcattttaaagagagatgcacttaagaatagagtgaactgctcatatgcttatttaagcttggacagttttcagagacaaaccccattaagaattactcttttcacatggctgaatcgaaacatgtgtaatgtcaatgtaaaaccaatcacagctgtgaactgcatgaaatgtattgtgaaacgaacacaagattaagctttgtcaggttaatgtagcatgttaaggactctagaaaaaaataaactaaggagacgagaaaaaaaaaaaa

SEQ ID NO: 18 - DNA, 1330 bp, Homo sapiens
  CDS (478)..(1098)
tggttcttcctttattcttaattcttaactgtgatggatccttgcaatgaaagaattaaaaagggcgggtgcggtggggcacgcctgtaattccagcactttggaaggtcgacgtgggacgattgcttaagcccagggctcaaggccagcctgggtaacatgaacaattcttaacgtccaaagataacgtctttccttaacgtcgaaagatgccttgttgtgatattacagcagtcattcctgctcactacgggcaggcagacagtgcagaaaaggtgaagcacaaaaactaaaaaggaaaatctctccttgaaccactgcgaacagatccgagtgctggggtactgctgccagctggttggtggagttctggttgaacagtgtcccgccaggtccgaagtggggacacgtctgttggtggtgtccacccaactcagccactgcaggaccatcttgcgactctttgatgacctggccatgtttgtctacactaagcaatatggcctgggggcacaggaggaggacgcctttgtccgctgtgtctccgtcctagggaacctggctgaccagctctactacccctgtgagcacgtggcctgggcggctgatgcccgggtcctccacgtggactcttctcggtggtggacgctgagtacaaccctgtgggccctctctctgctcctgggggttgccaggtccctgtggatgctgctgaaactgagacagaggctgcggagccccacggcgcccttcaccagcccgctgccccggggcaagcggagggccatggaggcgcagatgcagtcggaggcgctgtcacttctcagcaacctggccgacctggccaacgccgtgcactggctgccccggggcgtgctgtgggccggccgcttcccgccgtggctagtgggcctcatgggcaccacctcctgcctgccagcatgtaccaggcggcccgggccggcggccaggccgaggccactaccccctgacactgccggaagagcacagggacacagccagagcccacggagggcccttcccgcaaagcagaagccgccagggcaggggccggggctctcatggagctgcctgtggtgaaacccatgggcagggtgggtggagggactgatgcgaggtcccccaggcctcagcctggagctcctgagccgtgacagttttcaggggccgtgcagggcttcagcagcacctcctgcctgccagctggcgtcttgtatccaaatcaagatgaggaagagggggcctgtcgtgccttgagaaagctggaacgggaatcaattaaacattgtggtgctggaaaaaaaaaaaa

SEQ ID NO: 19 - DNA, 992 bp, Homo sapiens
  CDS (314)..(688)
tggtctctgcccctcctcagatggcctgttaggtaactcacctgtgtgtgtgtgcatggtccttcttgagtaatggctgcacaggaaggaaattacctagtggccactggaacaggagcctccggcagccatctttatgtccttgggctgagactccaggctgcccagcagaggataaggtggcctctgagaagcctcttttttgtcctctgaccttgggactccacactcctgcttccatggatttgaaggttccaacatcccccttctccacggtctccagcaggcacagcccaggtctgacggggaggtgatgcccacgctggacatggccttgttcgactggaccgattatgaagacttaaaacctgatggttggccctctgcaaagaagaaagagaaacaccgcggtaaactctccagtgatggtaacgaaacatcaccagccgaaggggaaccatgcgaccatcaccaatactgcctgacagggacttgctgcgacctgcgggagcatttctgcacaccccacaaccgaggcctgaacaacaaatgcttcgatgactgcatgtgtgtggaagggctgcgctgctatgccaaattccaccggaaccgcagggttacacggaggaaagggcgctgtgtggagcccgagacggccaacggcgaccagggatccttcatcaacgtctagcggccccgcgggactggggactgagcccaggaggtttgcacaagccgggcgatttgtttgtaactagcagtgggagatcaagttggggaacagatggctgaggctgcagactcaggcccaggacactcaaccccaggaggggagccgctcggcgaatgagctgggtgggtgcccaggagccggcccgcagcacctgcacacacgaagtccggacccacgcagcctccatcccgcgtgtcttgctctccgcgatggcaatgccgagagtgccctctactgtccgactccagcactgcaacag

SEQ ID NO: 20 - DNA, 11389 bp, Homo sapiens
  CDS (1)..(9042)
atggcgccgccgccgccgcccgtgctgcccgtgctgctgctcctggccgccgccgccgccctgccggcgatggggctgcgagcggccgcctgggagccgcgcgtacccggcgggacccgcgccttcgccctccggcccggctgtacctacgcggtgggcgccgcttgcacgccccgggcgccgcgggagctgctggacgtgggccgcgatgggcggctggcaggacgtcggcgcgtctcgggcgcggggcgcccgctgccgctgcaagtccgcttggtggcccgcagtgccccgacggcgctgagccgccgcctgcgggcgcgcacgcaccttcccggctgcggagcccgtgcccggctctgcggaaccggtgcccggctctgcggggcgctctgcttccccgtccccggcggctgcgcggccgcgcagcattcggcgctcgcagctccgaccaccttacccgcctgccgctgcccgccgcgccccaggccccgctgtcccggccgtcccatctgcctgccgccgggcggctcggtccgcctgcgtctgctgtgcgccctgcggcgcgcggctggcgccgtccgggtgggactggcgctggaggccgccaccgcggggacgccctccgcgtcgccatccccatcgccgcccctgccgccgaacttgcccgaagcccgggcggggccggcgcgacgggcccggcggggcacgagcggcagagggagcctgaagtttccgatgcccaactaccaggtggcgttgtttgagaacgaaccggcgggcaccctcatcctccagctgcacgcgcactacaccatcgagggcgaggaggagcgcgtgagctattacatggaggggctgttcgacgagcgctcccggggctacttccgaatcgactctgccacgggcgccgtgagcacggacagcgtactggaccgcgagaccaaggagacgcacgtcctcagggtgaaagccgtggactacagtacgccgccgcgctcggccaccacctacatcactgtcttggtcaaagacaccaacgaccacagcccggtcttcgagcagtcggagtaccgcgagcgcgtgcgggagaacctggaggtgggctacgaggtgctgaccatccgcgccagcgaccgcgactcgcccatcaacgccaacttgcgttaccgcgtgttggggggcgcgtgggacgtcttccagctcaacgagagctctggcgtggtgagcacacgggcggtgctggaccgggaggaggcggccgagtaccagctcctggtggaggccaacgaccaggggcgcaatccgggcccgctcagtgccacggccaccgtgtacatcgaggtggaggacgagaacgacaactacccccagttcagcgagcagaactacgtggtccaggtgcccgaggacgtggggctcaacacggctgtgctgcgagtgcaggccacggaccgggaccagggccagaacgcggccattcactacagcatcctcagcgggaacgtggccggccagttctacctgcactcgctgagcgggatcctggatgtgatcaaccccttggatttcgaggatgtccagaaatactcgctgagcattaaggcccaggatgggggccggcccccgctcatcaattcttcaggggtggtgtctgtgcaggtgctggatgtcaacgacaacgagcctatctttgtgagcagccccttccaggccacggtgctggagaatgtgcccctgggctaccccgtggtgcacattcaggcggtggacgcggactctggagagaacgcccggctgcactatcgcctggtggacacggcctccacctttctggggggcggcagcgctgggcctaagaatcctgcccccacccctgacttccccttccagatccacaacagctccggttggatcacagtgtgtgccgagctggaccgcgaggaggtggagcactacagcttcggggtggaggcggtggaccacggctcgccccccatgagctcctccaccagcgtgtccatcacggtgctggacgtgaatgacaacgacccggtgttcacgcagcccacctacgagcttcgtctgaatgaggatgcggccgtggggagcagcgtgctgaccctgcaggcccgcgaccgtgacgccaacagtgtgattacctaccagctcacaggcggcaacacccggaaccgctttgcactcagcagccagagagggggcggcctcatcaccctggcgctacctctggactacaagcaggagcagcagtacgtgctggcggtgacagcatccgacggcacacggtcgcacactgcgcatgtcctaatcaacgtcactgatgccaacacccacaggcctgtctttcagagctcccattacacagtgagtgtcagtgaggacaggcctgtgggcacctccattgctaccctcagtgccaacgatgaggacacaggagagaatgcccgcatcacctacgtgattcaggaccccgtgccgcagttccgcattgaccccgacagtggcaccatgtacaccatgatggagctggactatgagaaccaggtcgcctacacgctgaccatcatggcccaggacaacggcatcccgcagaaatcagacaccaccaccctagagatcctcatcctcgatgccaatgacaatgcaccccagttcctgtgggatttctaccagggttccatctttgaggatgctccaccctcgaccagcatcctccaggtctctgccacggaccgggactcaggtcccaatgggcgtctgctgtacaccttccagggtggggacgacggcgatggggacttctacatcgagcccacgtccggtgtgattcgcacccagcgccggctggaccgggagaatgtggccgtgtacaacctttgggctctggctgtggatcggggcagtcccactccccttagcgcctcggtagaaatccaggtgaccatcttggacattaatgacaatgcccccatgtttgagaaggacgaactggagctgtttgttgaggagaacaacccagtggggtcggtggtggcaaagattcgtgctaacgaccctgatgaaggccctaatgcccagatcatgtatcagattgtggaaggggacatgcggcatttcttccagctggacctgctcaacggggacctgcgtgccatggtggagctggactttgaggtccggcgggagtatgtgctggtggtgcaggccacgtcggctccgctggtgagccgagccacggtgcacatccttctcgtggaccagaatgacaacccgcctgtgctgcccgacttccagatcctcttcaacaactatgtcaccaacaagtccaacagtttccccaccggcgtgatcggctgcatcccggcccatgaccccgacgtgtcagacagcctcaactacaccttcgtgcagggcaacgagctgcgcctgttgctgctggaccccgccacgggcgaactgcagctcagccgcgacctggacaacaaccggccgctggaggcgctcatggaggtgtctgtgtctgatggcatccacagcgtcacggccttctgcaccctgcgtgtcaccatcatcacggacgacatgctgaccaacagcatcactgtccgcctggagaacatgtcccaggagaagttcctgtccccgctgctggccctcttcgtggagggggtggccgccgtgctgtccaccaccaaggacgacgtcttcgtcttcaacgtccagaacgacaccgacgtcagctccaacatcctgaacgtgaccttctcggcgctgctgcctggcggcgtccgcggccagttcttcccgtcggaggacctgcaggagcagatctacctgaatcggacgctgctgaccaccatctccacgcagcgcgtgctgcccttcgacgacaacatctgcctgcgcgagccctgcgagaactacatgaagtgcgtgtccgttctgcgattcgacagctccgcgcccttcctcagctccaccaccgtgctcttccggcccatccaccccatcaacggcctgcgctgccgctgcccgcccggcttcaccggcgactactgcgagacggagatcgacctctgctactccgacccgtgcggcgccaacggccgctgccgcagccgcgagggcggctacacctgcgagtgcttcgaggacttcactggagagcactgtgaggtggatgcccgctcaggccgctgtgccaacggggtgtgcaagaacgggggcacctgcgtgaacctgctcatcggcggcttccactgcgtgtgtcctcctggcgagtatgagaggccctactgtgaggtgaccaccaggagcttcccgccccagtccttcgtcaccttccggggcctgagacagcgcttccacttcaccatctccctcacgtttgccactcaggaaaggaacggcttgcttctctacaacggccgcttcaatgagaagcacgacttcatcgccctggagatcgtggacgagcaggtgcagctcaccttctctgcaggcgagacaacaacgaccgtggcaccgaaggttcccagtggtgtgagtgacgggcggtggcactctgtgcaggtgcagtactacaacaagcccaatattggccacctgggcctgccccatgggccgtccggggaaaagatggccgtggtgacagtggatgattgtgacacaaccatggctgtgcgctttggaaaggacatcgggaactacagctgcgctgcccagggcactcagaccggctccaagaagtccctggatctgaccggccctctactcctggggggtgtccccaacctgccagaagacttcccagtgcacaaccggcagttcgtgggctgcatgcggaacctgtcagtcgacggcaaaaatgtggacatggccggattcatcgccaacaatggcacccgggaaggctgcgctgctcggaggaacttctgcgatgggaggcggtgtcagaatggaggcacctgtgtcaacaggtggaatatgtatctgtgtgagtgtccactccgattcggcgggaagaactgtgagcaagccatgcctcacccccagctcttcagcggtgagagcgtcgtgtcctggagtgacctgaacatcatcatctctgtgccctggtacctggggctcatgttccggacccggaaggaggacagcgttctgatggaggccaccagtggtgggcccaccagctttcgcctccagatcctgaacaactacctccagtttgaggtgtcccacggcccctccgatgtggagtccgtgatgctgtccgggttgcgggtgaccgacggggagtggcaccacctgctgatcgagctgaagaatgttaaggaggacagtgagatgaagcacctggtcaccatgaccttggactatgggatggaccagaacaaggcagatatcgggggcatgcttcccgggctgacggtaaggagcgtggtggtcggaggcgcctctgaagacaaggtctccgtgcgccgtggattccgaggctgcatgcagggagtgaggatgggggggacgcccaccaacgtcgccaccctgaacatgaacaacgcactcaaggtcagggtgaaggacggctgtgatgtggacgacccctgtacctcgagcccctgtccccccaatagccgctgccacgacgcctgggaggactacagctgcgtctgtgacaaagggtaccttggaataaactgtgtggatgcctgtcacctgaacccctgcgagaacatgggggcctgcgtgcgctcccccggctccccgcagggctacgtgtgcgagtgtgggcccagtcactacgggccgtactgtgagaacaaactcgaccttccgtgccccagaggctggtgggggaaccccgtctgtggaccctgccactgtgccgtcagcaaaggctttgatcccgactgtaataagaccaacggccagtgccaatgcaaggagaattactacaagctcctagcccaggacacctgtctgccctgcgactgcttcccccatggctcccacagccgcacttgcgacatggccaccgggcagtgtgcctgcaagcccggcgtcatcggccgccagtgcaaccgctgcgacaacccgtttgccgaggtcaccacgctcggctgtgaagtgatctacaatggctgtcccaaagcatttgaggccggcatctggtggccacagaccaagttcgggcagccggctgcggtgccatgccctaagggatccgttggaaatgcggtccgacactgcagcggggagaagggctggctgcccccagagctctttaactgtaccaccatctccttcgtggacctcagggccatgaatgagaagctgagccgcaatgagacgcaggtggacggcgccagggccctgcagctggtgagggcgctgcgcagtgctacacagcacacgggcacgctctttggcaatgacgtgcgcacggcctaccagctgctgggccacgtccttcagcacgagagctggcagcagggcttcgacctggcagccacgcaggacgccgactttcacgaggacgtcatccactcgggcagcgccctcctggccccagccaccagggcggcgtgggagcagatccagcggagcgagggcggcacggcacagctgctccggcgcctcgagggctacttcagcaacgtggcacgcaacgtgcggcggacgtacctgcggcccttcgtcatcgtcaccgccaacatgattcttgctgtcgacatctttgacaagttcaactttacgggagccagggtcccgcgattcgacaccatccatgaagagttccccagggagctggagtcctccgtctccttcccagccgacttcttcagaccacctgaagaaaaagaaggccccctgctgaggccggctggccggaggaccaccccgcagaccacgcgcccggggcctggcaccgagagggaggccccgatcagcaggcggaggcgacaccctgatgacgctggccagttcgccgtcgctctggtcatcatttaccgcaccctggggcagctcctgcccgagcgctacgaccccgaccgtcgcagcctccggttgcctcaccggcccatcattaataccccgatggtgagcacgctggtgtacagcgagggggctccgctcccgagacccctggagaggcccgtcctggtggagttcgccctgctggaggtggaggagcgaaccaagcctgtctgcgtgttctggaaccactccctggccgttggtgggacgggagggtggtctgcccggggctgcgagctcctgtccaggaaccggacacatgtcgcctgccagtgcagccacacagccagctttgcggtgctcatggatatctccaggcgtgagaacggggaggtcctgcctctgaagattgtcacctatgccgctgtgtccttgtcactggcagccctgctggtggccttcgtcctcctgagcctggtccgcatgctgcgctccaacctgcacagcattcacaagcacctcgccgtggcgctcttcctctctcagctggtgttcgtgattgggatcaaccagacggaaaacccgtttctgtgcacagtggttgccatcctcctccactacatctacatgagcacctttgcctggaccctcgtggagagcctgcatgtctaccgcatgctgaccgaggtgcgcaacatcgacacggggcccatgcggttctactacgtcgtgggctggggcatcccggccattgtcacaggactggcggtcggcctggacccccagggctacgggaaccccgacttctgctggctgtcgcttcaagacaccctgatttggagctttgcggggcccatcggagctgttataatcatcaacacagtcacttctgtcctatctgcaaaggtttcctgccaaagaaagcaccattattatgggaaaaaagggatcgtctccctgctgaggaccgcattcctcctgctgctgctcatcagcgccacctggctgctggggctgctggctgtgaaccgcgatgcactgagctttcactacctcttcgccatcttcagcggcttacagggccccttcgtcctccttttccactgcgtgctcaaccaggaggtccggaagcacctgaagggcgtgctcggcgggaggaagctgcacctggaggactccgccaccaccagggccaccctgctgacgcgctccctcaactgcaacaccaccttcggtgacgggcctgacatgctgcgcacagacttgggcgagtccaccgcctcgctggacagcatcgtcagggatgaagggatccagaagctcggcgtgtcctctgggctggtgaggggcagccacggagagccagacgcgtccctcatgcccaggagctgcaaggatccccctggccacgattccgactcagatagcgagctgtccctggatgagcagagcagctcttacgcctcctcacactcgtcagacagcgaggacgatggggtgggagctgaggaaaaatgggacccggccaggggcgccgtccacagcacccccaaaggggacgctgtggccaaccacgttccggccggctggcccgaccagagcctggctgagagtgacagtgaggaccccagcggcaagccccgcctgaaggtggagaccaaggtcagcgtggagctgcaccgcgaggagcagggcagtcaccgtggagagtaccccccggaccaggagagcgggggcgcagccaggcttgctagcagccagcccccagagcagaggaaaggcatcttgaaaaataaagtcacctacccgccgccgctgacgctgacggagcagacgctgaagggccggctccgggagaagctggccgactgtgagcagagccccacatcctcgcgcacgtcttccctgggctctggcggccccgactgcgccatcacagtcaagagccctgggagggagccggggcgtgaccacctcaacggggtggccatgaatgtgcgcactgggagcgcccaggccgatggctccgactctgagaaaccgtgaggcaagcccgtcaccccacacaggctgcggcatcaccctcagaccttggagcccaaggggccactgcccttgaagtggagtgggcccagagtgtggcggtccccatggtggcagccccccgactgatcatccagacacaaaggtcttggttctcccaggagctcagggcctgtcagacctggtgacaagtgccaaaggccacaggcatgagggaggcgtggaccactgggccagcaccgctgagtcctaagactgcagtcaaagccagaactgagaggggaccccagactgggcccagaggctggccagagttcaggaacgccgggcacagaccaaagaccgcggtccagccccgcccaggcgggcatctcatggcagtgcggacccgtggctggcagcccgggcagtcctttgcaaaggcaccccttgtcttaaaatcacttcgctatgtgggaaaggtggagatacttttatatatttgtatgggactctgaggaggtgcaacctgtatatatattgcattcgtgctgactttgttatcccgagagatccatgcaatgatctcttgctgtcttctctgtcaagattgcacagttgtacttgaatctggcatgtgttgacgaaactggtgccccagcagatcaaaggtgggaaatacgtcagcagtggggctaaaaccaagcggctagaagccctacagctgccttcggccaggaagtgaggatggtgtgggccctccccgccggccccctgggtccccagtgttcgctgtgtgtgcgtttgtcctctgctgccatctgccccggctgtgtgaattcaagacagggcagtgcagcactaggcaggtgtgaggagccctgctgaggtcactgtggggcacggttgccacacggctgtcatttttcacctggtcattctgtgaccaccaccccctcccctcaccgcctcccaggtggcccgggagctgcaggtggggatggctttgtcctttgctcctgctccccgtgggacctgggaccttaaagcgttgcaggttcctgatttggacagaggtgtggggccttccaggccgttacatacctcctgccaattctctaactctctgagactgcgaggatctccaggcagggttctcccctctggagtctgaccaattacttcattttgcttcaaatggccaattgtgcagagggacaaagccacagccacactcttcaacggttaccaaactgtttttggaaattcacaccaaggtcgggcccactgcaggcagctggcacagcgtggcccgaggggctgtggaacgggtcccggaactgtcagacatgtttgattttagcgtttcctttgttcttcaaatcaggtgcccaaataagtgatcagcacagctgcttccaaataggagaaaccataaaataggatgaaaatcaagtaaaatgcaaagatgtccacactgttttaaacttgaccctgatgaaaatgtgagcactgttagcagatgcctatgggagaggaaaagcgtatctgaaaatggtccaggacaggaggatgaaatgagatcccagagtcctcacacctgaatgaattatacatgtgccttaccaggtgagtggtctttcgaagataaaaaactctagtccctttaaacgtttgcccctggcgtttcctaagtacgaaaaggtttttaagtcttcgaacagtctcctttcatgactttaacaggattctgccccctgaggtgtaatttttttgttctatttttttccacgtactccacagccaacatcacgaggtgtaatttttaatttgatcagaactgttaccaaaaaacaactgtcagttttattgagatgggaaaaatgtaaacctatttttattacttaagactttatgggagagattagacactggaggtttttaacagaacgtgtatttattaatgttcaaaacactggaattacaaatgagaagagtctacaataaattaagatttttgaatttgtacttctgcggtgctggtttttctccacaaacacccccgcccctccccatgcccagggtggccgtggaagggacggtttacggacgtgcagctgagctgtccgtgtcccatgctccctcagccagtggaacgtgccggaactttttgtccattccctagtaggcctgccacagcctagatgggcagtttttgtctttcaccaaatttgaggactttttttttttgccattatttcttcagttttcttttcttgcactgatctttctcctctccttctgtgactccagtgactcagacgttagacctcttgatgttttcccactggtccctgaggctctgttc

SEQ ID NO: 21 - DNA, 4087 bp, Homo sapiens
  CDS (113)..(4084)
aattcccgggtcgacgatttcgtggcggcgcccagttggggcgggttcgttcgcttcgcgttttggccagggcgggggtctgggctttaggcaggtagtatttagtttcacaatgtttggggacctgtttgaagaggagtattccactgtgtctaataatcagtatggaaaagggaagaaattaaagactaaagctttggagccacctgctcctagagaattcaccaatttaagcggaatcagaaatcagggtggaacctgttacctcaattcccttcttcagactcttcatttcacacctgaattcagagaagctctattttctcttggcccagaagagcttggtttgtttgaagataaggataaacccgatgcaaaggttcgaatcatccctttacagttacagcgcttgtttgctcagcttctgctcttagaccaggaagctgcatccacagcagacctcactgacagctttgggtggaccagtaatgaggaaatgaggcaacatgatgtgcaggaactgaatcgaatcctcttcagcgctttggaaacttctttagttgggacctccggtcatgacctcatctatcgtctgtaccatggaaccattgttaaccagattgtttgtaaagaatgtaagaacgttagcgagaggcaggaagacttcttagatctaacagtagcagtcaaaaatgtatccggtttggaagatgctctctggaacatgtatgtagaagaggaagtttttgattgtgacaacttgtaccactgtggaacttgtgacaggctggttaaagcagcaaagtcggccaaattacgtaagctgcctccttttcttactgtttcattactaagatttaattttgattttgtgaaatgcgaacgctacaaggaaactagctgttatacattccctctccggattaatctcaagcccttttgtgaacagagtgaattggatgacttagaatatatatatgacctcttctcagttattatacacaaaggtggctgctacggaggccattaccatgtatatattaaagatgttgatcatttgggaaactggcagtttcaagaggaaaaaagtaaaccagatgtgaatctgaaagatctccagagtgaagaagagattgatcatccactgatgattctaaaagcaatcttattagaggagaataatctaattcctgttgatcagctgggccagaaacttttgaaaaagataggaatatcttggaacaagaagtacagaaaacagcatggaccattgcggaagttcttacagctccattctcagatatttctactcagttcagatgaaagtacagttcgtctcttgaagaatagttctctccaggctgagtctgatttccaaaggaatgaccagcaaattttcaagatgcttcctccagaatccccaggtttaaacaatagcatctcctgtccccactggtttgatataaatgattctaaagtccagccaatcagggaaaaggatattgaacagcaatttcagggtaaagaaagtgcctacatgttgttttatcggaaatcccagttgcagagaccccctgaagctcgagctaatccaagatatggggttccatgtcatttactgaatgaaatggatgcagctaacattgaactgcaaaccaaaagggcagaatgtgattctgcaaacaatacttttgaattgcatcttcacctgggccctcagtatcatttcttcaatggggctctgcacccagtagtctctcaaacagaaagcgtgtgggatttgacctttgataaaagaaaaactttaggagatctccggcagtcaatatttcagctgttagaattttgggaaggagacatggttcttagtgttgcaaagcttgtaccagcaggacttcacatttaccagtcacttggcggggatgaactgacactgtgtgaaactgaaattgctgatggggaagacatctttgtgtggaatggggtggaggttggtggagtccacattcaaactggtattgactgcgaacctctacttttaaatgttcttcatctagacacaagcagtgatggagaaaagtgttgtcaggtgatagaatctccacatgtctttccagctaatgcagaagtgggcactgtcctcacagccttagcaatcccagcaggtgtcatcttcatcaacagtgctggatgtccaggtggggagggttggacggccatccccaaggaagacatgaggaagacgttcagggagcaagggctcagaaatggaagctcaattttaattcaggattctcatgatgataacagcttgttgaccaaggaagagaaatgggtcactagtatgaatgagattgactggctccacgttaaaaatttatgccagttagaatctgaagagaagcaagttaaaatatcagcaactgttaacacaatggtgtttgatattcgaattaaagccataaaggaattaaaattaatgaaggaactagctgacaacagctgtttgagacctattgatagaaatgggaagcttctttgtccagtgccggacagctatactttgaaggaagcagaattgaagatgggaagttcattgggactgtgtcttggaaaagcaccaagttcgtctcagttgttcctgttttttgcaatggggagtgacgttcaacctgggacagaaatggaaatcgtagtagaagaaacaatatctgtgagagattgtttaaagttaatgctgaagaaatctggcctacaaggagatgcctggcatttacgaaaaatggattggtgctatgaagctggagagcctttatgtgaagaagatgcaacactgaaagaacttctgatatgttctggagatactttgcttttaattgaaggacaacttcctcctctgggtttcctgaaggtgcccatctggtggtaccagcttcagggtccctcaggacactgggagagtcatcaggaccagaccaactgtacttcgtcttggggcagagtttggagagccacttccagccaaggtgcttctgggaacgagcctgcgcaagtttctctcctctacttgggagacatagagatctcagaagatgccacgctggcggagctgaagtctcaggccatgaccttgcctcctttcctggagttcggtgtcccgtccccagcccacctcagagcctggacggtggagaggaagcgcccaggcaggcttttacgaactgaccggcagccactcagcccccaggacgtgctgctgaggacacaggtgcgcatccctggtgagaggacctatgcccctgccctggacctggtgtggaacgcggcccagggtgggactgccggctccctgaggcagagagttgccgatttctatcgtcttcccgtggagaagattgaaattgccaaatactttcccgaaaagttcgagtggcttccgatatctagctggaaccaacaaataaccaagaggaaaaagaaaaaaaaacaagattatttgcaaggggcaccgtattacttgaaagacggagatactattggtgttaagccctttaaagtccccctgtttggccactcgcagtggaagcttctggagctgaagggaaagaatctcctgattgacgacgatgatgatttcagtacaatcagagatgacactggaaaagaaaagcagaaacaacgggccctggggagaaggaaaagtatcttggctgcccgtgtgccagggactgcatgccctctgccactgggggcgtctggggaagagaggtcccaggtggaggtggcagggcagctctgcagccctcaggtcctggtgccctcagagacctgggatatgggagaggggctgcagcgctggctgcttcgggggttttcctgtttaaagaaaatgcacaacgtgtgcgtgaaccgcaggtatggaggcagcggcatgccgttgctccgctgtgggagacggttgactttcccagacagcagcttagcggaaagcagcatcccgaagacggtgtcgcatgtcctgagcctgcttgtcacctgggcctcacggtttctcgtcagccccgtcactgatgggaagcagcactga

SEQ ID NO: 22 - DNA, 4153 bp, Homo sapiens
  CDS (113)..(4150)
aattcccgggtcgacgatttcgtggcggcgcccagttggggcgggttcgttcgcttcgcgttttggccagggcgggggtctgggctttaggcaggtagtatttagtttcacaatgtttggggacctgtttgaagaggagtattccactgtgtctaataatcagtatggaaaagggaagaaattaaagactaaagctttggagccacctgctcctagagaattcaccaatttaagcggaatcagaaatcagggtggaacctgttacctcaattcccttcttcagactcttcatttcacacctgaattcagagaagctctattttctcttggcccagaagagcttggtttgtttgaagataaggataaacccgatgcaaaggttcgaatcatccctttacagttacagcgcttgtttgctcagcttctgctcttagaccaggaagctgcatccacagcagacctcactgacagctttgggtggaccagtaatgaggaaatgaggcaacatgatgtgcaggaactgaatcgaatcctcttcagcgctttggaaacttctttagttgggacctccggtcatgacctcatctatcgtctgtaccatggaaccattgttaaccagattgtttgtaaagaatgtaagaacgttagcgagaggcaggaagacttcttagatctaacagtagcagtcaaaaatgtatccggtttggaagatgctctctggaacatgtatgtagaagaggaagtttttgattgtgacaacttgtaccactgtggaacttgtgacaggctggttaaagcagcaaagtcggccaaattacgtaagctgcctccttttcttactgtttcattactaagatttaattttgattttgtgaaatgcgaacgctacaaggaaactagctgttatacattccctctccggattaatctcaagcccttttgtgaacagagtgaattggatgacttagaatatatatatgacctcttctcagttattatacacaaaggtggctgctacggaggccattaccatgtatatattaaagatgttgatcatttgggaaactggcagtttcaagaggaaaaaagtaaaccagatgtgaatctgaaagatctccagagtgaagaagagattgatcatccactgatgattctaaaagcaatcttattagaggagaataatctaattcctgttgatcagctgggccagaaacttttgaaaaagataggaatatcttggaacaagaagtacagaaaacagcatggaccattgcggaagttcttacagctccattctcagatatttctactcagttcagatgaaagtacagttcgtctcttgaagaatagttctctccaggctgagtctgatttccaaaggaatgaccagcaaattttcaagatgcttcctccagaatccccaggtttaaacaatagcatctcctgtccccactggtttgatataaatgattctaaagtccagccaatcagggaaaaggatattgaacagcaatttcagggtaaagaaagtgcctacatgttgttttatcggaaatcccagttgcagagaccccctgaagctcgagctaatccaagatatggggttccatgtcatttactgaatgaaatggatgcagctaacattgaactgcaaaccaaaagggcagaatgtgattctgcaaacaatacttttgaattgcatcttcacctgggccctcagtatcatttcttcaatggggctctgcacccagtagtctctcaaacagaaagcgtgtgggatttgacctttgataaaagaaaaactttaggagatctccggcagtcaatatttcagctgttagaattttgggaaggagacatggttcttagtgttgcaaagcttgtaccagcaggacttcacatttaccagtcacttggcggggatgaactgacactgtgtgaaactgaaattgctgatggggaagacatctttgtgtggaatggggtggaggttggtggagtccacattcaaactggtattgactgcgaacctctacttttaaatgttcttcatctagacacaagcagtgatggagaaaagtgttgtcaggtgatagaatctccacatgtctttccagctaatgcagaagtgggcactgtcctcacagccttagcaatcccagcaggtgtcatcttcatcaacagtgctggatgtccaggtggggagggttggacggccatccccaaggaagacatgaggaagacgttcagggagcaagggctcagaaatggaagctcaattttaattcaggattctcatgatgataacagcttgttgaccaaggaagagaaatgggtcactagtatgaatgagattgactggctccacgttaaaaatttatgccagttagaatctgaagagaagcaagttaaaatatcagcaactgttaacacaatggtgtttgatattcgaattaaagccataaaggaattaaaattaatgaaggaactagctgacaacagctgtttgagacctattgatagaaatgggaagcttctttgtccagtgccggacagctatactttgaaggaagcagaattgaagatgggaagttcattgggactgtgtcttggaaaagcaccaagttcgtctcagttgttcctgttttttgcaatggggagtgacgttcaacctgggacagaaatggaaatcgtagtagaagaaacaatatctgtgagagattgtttaaagttaatgctgaagaaatctggcctacaaggagatgcctggcatttacgaaaaatggattggtgctatgaagctggagagcctttatgtgaagaagatgcaacactgaaagaacttctgatatgttctggagatactttgcttttaattgaaggacaacttcctcctctgggtttcctgcaagtgcccatctggtggtaccagcttcagggtccctcaggacactgggagagtcatcaggaccagaccaactgtacttcgtcttggggcagagtttggagagccacttccagccaaggtgcttctgggaacgagcctgcgcaagtttctctcctctacttgggagacatagagatctcagaagatgccacgctggcggagctgaagtctcaggccatgaccttgcctcctttcctggagttcggtgtcccgtccccagcccacctcagagcctggacggtggagaggaagcgcccaggcaggcttttacgaactgaccggcagccactcagggaatataaactaggacggagaattgagatctgcttagagccccttcagaaaggcgaaaacttgggcccccaggacgtgctgctgaggacacaggtgcgcatccctggtgagaggacctatgcccctgccctggacctggtgtggaacgcggcccagggtgggactgccggctccctgaggcagagagttgccgatttctatcgtcttcccgtggagaagattgaaattgccaaatactttcccgaaaagttcgagtggcttccgatatctagctggaaccaacaaataaccaagaggaaaaagaaaaaaaaacaagattatttgcaaggggcaccgtattacttgaaagacggagatactattggtgttaagccctttaaagtccccctgtttggccactcgcagtggaagcttctggagctgaagggaaagaatctcctgattgacgacgatgatgatttcagtacaatcagagatgacactggaaaagaaaagcagaaacaacgggccctggggagaaggaaaagtatcttggctgcccgtgtgccagggactgcatgccctctgccactgggggcgtctggggaagagaggtcccaggtggaggtggcagggcagctctgcagccctcaggtcctggtgccctcagagacctgggatatgggagaggggctgcagcgctggctgcttcgggggttttcctgtttaaagaaaatgcacaacgtgtgcgtgaaccgcaggtatggaggcagcggcatgccgttgctccgctgtgggagacggttgactttcccagacagcagcttagcggaaagcagcatcccgaagacggtgtcgcatgtcctgagcctgcttgtcacctgggcctcacggtttctcgtcagccccgtcactgatgggaagcagcactga

SEQ ID NO: 23 - DNA, 776 bp, Homo sapiens
  CDS (147)..(443)
cagcaggttggctcacagcagaaggcaaaggccatcatcagctccctttataagggaacggtcatgcactgggtgtgctgagagtgtcctgcctggtcctctgtgcctggtggggtggaggtgccaggtgtgtccagaggagcccaatgggcagtgaggcagccatggggctggatgcactggtgcccctggcagtgacagtggccatcttcctgctcctggtggacctgatgcagcagcaccaacgctggactgcacgctacccgccaggccccctgccactgcccgggctgggcaacttgctgcatgtggacttccagaacatatacaccttcaaccaggtgagggaggaggtcctgaggatcccccaccaccagcaaacatgggtggtgggtggagccacagtctggacaagaagccaggctgagaaggggaagcagatttgagggacttcctgggggagggcatttatgcatggcatgaaagatggcattttccaaaggccaaggaagagtaaggcaagggcctggaggtggaactgtacttggcagtgggcgtgcacgcccattggccatcatatgttaaggaccacaaggtccctcttgtgacaccagaatgaaagggcctggcaaatggaacaaccagccaggggccctggttagcccttttatatcccacaattataccctggggctctcttgtccctacacccccgtttccttctctttgtttctctacggaatctcctgtcttgtcgctgttttcctttttttggc

SEQ ID NO: 24 - DNA, 1621 bp, Homo sapiens
  CDS (38)..(1411)
gatatgtccaagaaaccaccccctgataacgtctttgatgacatgccaagcttggcacgaggcagaggagggacacggaattactcacagctgtgctgtgtgcattctctgtgggcctagcagggaaggggacagccctgtggcaatgggcatgacacggatgctcctggaatgcagtctcagtgacaagttgtgtgtcatccaggagaagcagtatgaagtgattatcgtcccaactttgttggttactatcttcctcatccttcttggggtcatcctgtggctttttatcagagaacaaagaactcaacagcagcgttctggacctcaaggcattgcccctgttcctccacctagggacctaagctgggaagcaggacatggaggaaatgtggctttgccacttaaggagacatccgtggaaaactttctgggagctaccacacctgccctggctaagctgcaggtgccgcgggagcaactctctgaagttctggagcagatttgcagtggtagctgtgggcccatctttcgagccaatatgaacactggggacccttctaagcccaagagtgttattctcaaggctttaaaagaaccagctgggctccatgaggtacaagatttcttagggcgaatcaaattccatcaatacctggggaaacacaaaaacctggtgcagctggaaggctgctgcactgaaaagctgccactctatatggtgttggaggatgtggcccagggggacctgctcggctttctctggacctgtcggcgggatgtgatgactatggatggtcttctctatgatctcacagaaaaacaagtatatcacatcggaaagcaggtccttttggcgctggaattcctgcaggagaagcatttgttccatggggatgtggcagccaggaatattctgatgcaaagtgatctcactgctaagctctgtggattaggcctggcttatgaagtttacacccgaggggccatctcctctactcaaaccatacctctcaagtggcttgccccagaacggcttctcctgagacctgctagcatcagagcagatgtctggtcttttgggatcctgctctatgagatggtgactctaggagcaccaccgtatcctgaagtccctcctaccagcatcctagagcatctccaaagaaggaaaatcatgaagagacccagtagctgcacacataccatgtacagtatcatgaagtcctgctggcgctggcgtgaggctgaccgcccctcacctagagagctgcgcttgcgcctagaagctgccattaaaactgcagatgacgaggctgtgttacaagtaccagagttggtggtacctgaactgtatgcagctgtggccggcatcagagtggagagcctcttctacaactatagcatgctttgaagagtctcgggcaagaaacattcatgcatgagtatatgttcttggaatcaattcctctaagaacagagaatggtctttcccagggacacaaagggagaaatgggacatggattcttgatcttcctttacacatttctcgggaaatctgaaatgatgctggatgggactctacacatcctgagctaagacatactgtcagtctcactt

SEQ ID NO: 25 - DNA, 740 bp, Homo sapiens
  CDS (70)..(687)
gggctgggcagatgggtgggtgagttccctctccccagagccatcggccaggtaccaaagctcagctgtatggattcccaacaggaggacctgcgcttccctgggatgtgggtctcattgtactttggaatcctggggctgtgttctgtgataactggagggtgcattatctttctgcactggaggaagaacttgaggcgggaagagcatgcccagcagtgggtggaggtgatgagagctgccacattcacctacagcccattgttgtactggattaacaagcgacggcgctacggcatgaatgcagccatcaacacgggccctgcccctgctgtcaccaagactgagactgaggtccagaatccagatgttctgtgggatttggacatccccgaaggcaggagccatgctgaccaagacagcaaccccaaggcggaagcccctgctcccctgcaacctgcactgcagctggctccacagcagccccaggccagatccccattcccacttcccatctttcaggaggtgccctttgccccacccttgtgcaacctaccccccctgctgaaccactctgtctcctatcctttggccacctgtcctgaaaggaatgttctcttccattccctcctgaatctggcccaggaagaccatagcttcaatgccaagccttttccttcagaactgtagcctcctctcactgaaggtgggagctgcaggaatcaggtgcagagtaggaa

SEQ ID NO: 26 - DNA, 1812 bp, Homo sapiens
  CDS (358)..(1200)
gccgcccggccgagcgcggagcgcagccactcgccgctgcccagggagcgcccaagatgtggggggaccggggcggcagcggccgtagcagcgccagggacgggggcacgcagcagcctccgctcgcccgcctgtcctgacctgcctcgcttgcccccaaagaatgtcagccaagtccaaggggaacccctcctcgtcctgtccagccgagggaccgccggcagcctccaaaaccaaggtgaaggaacagatcaagatcatcgtggaggatttggaattagtcctgggcgacctgaaggacgtggccaaggaacttaaggagatgaagtcccactctgttgcccaggctagagtgcaatggcacaatctgggctcactgcaacctctgcctcccaggttcaagctattctcctgcctcagcctgcctcagtgcgccactacgcctgggtggttgaccagattgacaccctgacctctgacctacagctggaggatgagatgactgacagctccaaaacggacacgctgaatagtagctcaagtggcacaacagcctccagcctagagaagatcaaagtgcaggctaatgcaccgcttattaaacccccagcacacccatctgctatcctcacggtcctgagaaagccaaaccctccaccacctcctccaaggttgacacctgtgaagtgtgaagaccccaaaagggtggttccaactgccaatcctgtaaaaaccaatggcacccttctacgaaatggaggcttaccaggtggacctaacaaaattccaaatggagatatctgctgcatacccaacagtaacttggacaaggctccagtccagcttctgatgcatagacctgaaaaagacagatgtccccaggcagggcctcgagaacgagttcggtttaatgaaaaagtacagtaccatggctattgtcctgactgtgatacccggtataacataaaaaacagggaggtccacttacacagtgaacctgtccacccaccgggaaagattcctcaccaaggccctcccctccctcctacaccccatctccctcctttcccactagaaaatgggggaatgggaataagccacagtaacagcttcccccctatcagacctgcaactgtgcctcctcccactgcaccaaaaccacagaagacgatcttgaggaagtcaaccactacaaccgtgtgatgtatgccattaaaaaaattgtttttttaattttctatattataaacataaaataagtaatgagcactttctactcaagcaataaaaagcccaaatatattaatcctgcattcagcaaagtggcataaaaatcacctggtaagtatgcagcacattgcttatatcctgggtatgcattattttaaatgttgtatcattaaaaacctcagaatgatgaaaaatatgaatgatgcattgtttttgcaattgacctatgacaaactgtgaacctgcagatttcacctattttgatttactataagagctgggatttgattcattttatttatgcctaagtcatctatgcattaacatgtcatattcttaactttgatctaatgctttttactaggaaattttaatactgaaggactattttattatttttttctaaagatgtttgtcactagtttttcattattaaatgctgaggccaataccaagaagtttattttctatattatacaattatgaattacatgctcagctatatatgtaataaaatactttggtctgtggaaatattgttaaatcaataaacaatagtaaataatgacaaaaaaaaaaaaa

SEQ ID NO: 27 - DNA, 1210 bp, Homo sapiens
  CDS (251)..(1027)
tatctttcagtgcaggcctggcatctcttgggcacacaccgattcgtgcatgtagttgacagtgaataagctaaatgtgcatttgatgccactctagggcgtatgccagatactgggttaggcttcatgtgctccaggtgaccaaagtctgaccccctagcctggacaggtttcctgtctggccctcgctgatctctgaacctgtgccacttttgttctgctgccctgccattcctctcttacacacctgatgtctcctgcagttgtgccaaatctttggagtgttgatggagaagttacagtagctgaacagaagccgggagaaattgctgaagaactcgcaagctcctacgaaagaaagctcatcgaggtggcagagatgcatggcgagctgattgagttcaacgagcgcctgcacagggccctggtagccaaggaagccctcgtgtcccagatgaggcaggagctcatcgatctccggggaccggtgcctggagatttgagtcaaacgtccgaagaccagagtttgtcggattttgaaatatcaaaccgggcgctgatcaacgtctggatcccctcagtgtttctccggggcaaagcagcaaatgcattccacgtgtatcaggtctacatccggataaaagacgatgaatggaatatttatcgccggtatacagagttcaggagtttgcaccacaagttacaaaacaagtaccctcaagtgagggcctacaacttcccacccaaaaaggccattggaaacaaggatgccaagtttgtggaggaacggagaaagcagctccagaattacctgcgcagcgtcatgaacaaagtcatccagatggtccccgagttcgctgccagccccaagaaggagaccctcatccagctgatgcccttcttcgtcgacatcaccccgcccggagagcctgtgaacagccggcccaaagcagcttcccgctttcccaaactgtcccggggtcagccccgggagacccgcaacgtggagccccagagcggtgacctctgacctcgacaaaaccgcagccacgggccctgtgcgtggcaccagctgcgtccaccccagccactgccgctggcccctcacctcagcgtgacaaccacgtcccactggtgatcctgagagcacacgattcccaacagttacacaacaccccgattaaactaatcagtcttcaaaaaaaaaaaa

SEQ ID NO: 28 - DNA, 2957 bp, Homo sapiens
  CDS (330)..(2870)
ggcaaggtctcatgggaaaggtcatgtctctcgaagaaaggttataaaccctgagatatgagggttgggcgagacatccgagcctgtttcgttccgtgttgggaccaggaataaccctgacttctgagctttcataaccccaggatcctccagaaaatttgcggcgcgctgagggaaaaccttgctgaagctgtacattggaatgcgtttacagtcattgtaatggaagcaaaatacatgaaggaaaaactgttatttgtatccctgcttattgcacctgacgactagttgcagatggttttgtttacctaagaaaacttgtgatataaatgaaaaaaacacctgttttcctagagtcattggttacaaatatgcttcgtctaagagctatttgtccattctcctggagagtgtttcaatttcgacccatcagttgtgaaccactaattattcagatgaataagtgtacagatgaggagcaaatgtttggttttattgaaagaaacaaagccatactttcagaaaagcaagtgggatgtgcatttgatatgctttggaagcttcaaaagcagaagaccagcctgttaaaaaatgctgagtatgtcagagaccatcctcaatttcttactcttcataatttagctacaaataaattcaaattaatgaatgacgataccctggtgaatgtgttatacgtcacacaacagtttgctggtgaggcccatgacccgctagttgaagcactagttacagaagcatggagaaggctagaaaggtttgatattaaactgctctcagaattttcctcttgcctagcagatcagcatttgtattttagtccattaatgggaaaaatagctgatattgttcataggaacttggaaaccacacaggacttaagttccttgtctgtcttgatggtcaacatatcttctttaatatcacgacattttcaacaacaactggtgaacaaaacagaacttctttttgacaccatagattcttctgaggtcaacgttgcaaaaagcatagcaaagtttcttcgaaatgttagatatcgttatcaaccactattagaaagatgtaataacgtatttttaagtaatgtggaccaccttgatttggattccatcagtaaaatacttagtgtatacaaatttctacaatttaatagttttgaatttattataatggctaaaaagaagctaactgaaatgattcctctgtgtaatcatcctgctagctttgtaaaattgtttgtagcattgggacccattgcaggacctgaagaaaagaaacaacttaaatcaactatgttattgatgtcagaggacctaactggcgagcaagccctggcagtgttgggagcaatgggagatatggaaagcagaaactcatgtctgattaaaagagttacttcagttctgcataaacatttggatggctataaaccattagagttgttgaagataactcaagaattgacttttctgcatttccaaaggaaggagttttttgcgaaacttagagaattactgcttagttatttgaaaaatagtttcataccaactgaggtgtctgttctggtccgtgctatttccctgctcccttctcctcacttggacgaagtggggatatcccgaattgaagccgttttaccacagtgtgacctaaataacctgagtagttttgccacatctgttttaagatggattcagcatgatcacgtgtatttggataatatgactgcgaaacaactgaaactacttcaaaaattagatcactatggtcgtcagagactacaacacagcaacagtttggatctgttacggaaggaacttaaatctctcaaaggaaacacgtttcctgagtcacttcttgaagaaatgattgctactttacagcatttcatggatgatattaattacataaatgttggggagattgcatcttttatttctagtactgattacctcagtactttgctactagataggatagcctcagtggctgttcagcagattgaaaagatccatccttttacaatccctgctattattcgtccattcagcgtattgaactatgatccacctcaaagggatgaatttttgggaacttgcgtgcaacatcttaattcttacttaggtatattggatccttttatattagtgtttcttggtttctctttggccacacttgaatattttccagaagatctgctaaaggcaatttttaacatcaaattcttagctagattggattctcaacttgaaattttatctccatctcgaagtgcaagagtccagtttcatcttatggagttaaatagatcagtctgcttggaatgccctgagtttcagattccatggtttcatgaccgcttctgtcaacaatataataaaggtattggtggcatggatggaacacaacagcagatttttaaaatgttagcagaggtactaggaggaatcaattgtgtaaaagcctcggttcttacgccttattaccacaaagtagattttgagtgtatcttggataaaagaaaaaaacctcttccgtatggaagccataatatagcattgggacaactaccagaaatgccctgggaatcaaatatcgaaatagttggatcaaggctgccaccaggggctgaaaggattgctttggaatttttggattcaaaagcactttgtagaaatatccctcacatgaaaggaaaatctgctatgaaaaaacgacatttggaaattctggggtatcgtgtaattcagatttcccagtttgaatggaactctatggcactgtcaacaaaggatgctcggatggactacctgagagaatgtatatttggagaagtcaagtcatgtttgtagtttttatttaaaatgaatgttatcgtgtgttacatttggacctattttaataaagtggcctgtctcaattaaaaaaaaaaaaaa

SEQ ID NO: 29 - DNA, 596 bp, Homo sapiens
  CDS (73)..(546)
cgtcttgggctccatttgtgtctctaaatcaggtggcagagcatttctataacactggttgagaaagttcagatgattgctgtaatcctaggatccctgttcttaatagccagtgtgacttggctcctctggtcagccttcagcccctatgcagtgtggcagaggaaggacatcctttttcagatctgctatggaatgtatggttttatggatctagtgtgcataggtctcattgttcatgaaggagctgcagtttacagagtgtttaagcgctggcgagctgtgaatttgcactgggatgtgttaaattatgacaaagccacagacatcgaagaaagcagccggggagagtcttccacaagtaggactttgtggttgccattgacagctctgcggaacagaaacttggtccacccaactcagttaacctcaccaaggtttcagtgtggctatgtgttattgcacctgttcaatcggatgaggccccatgaagacttatcagaagataacagctcgggggaggttgtgatgagagtgacttcagtgtgacaaaagcataagatgatgcagtgtggaccaccctgcacattttgcaa

SEQ ID NO: 30 - DNA, 870 bp, Homo sapiens
  CDS (25)..(669)
tttcgtgcgggcggaggagcggccatgccgccgcggcgcatcatcgtggaggtgaaggtgctagacgtgcagaagcggcgggtgcccaacaagcattatgtctacatcatccgggtcacgtggtccagcggctccaccgaggccatttaccggcgctacagcaagttttttgacctccagatgcagatgttggacaaatttcccatggaaggaggacagaaggaccccaagcagcggatcatcccctttctgccaggtaagattctcttcagacgaagccacatccgggacgtggctgtcaaacgcctgataccaattgatgaatactgtaaggccctcatccagctgcccccctacatctctcagtgtgatgaggtgctgcagttctttgagacaagacctgaggacctgaatccccccaaagaggagcacattgggaaaaagaaatctgggggtgaccaaacctcagtggaccccatggtcctggagcagtatgtggtggtagccaactaccagaagcaggagagttcggagatcagcctcagcgtggggcaggtggtggacatcatcgagaagactgagtcaggttggtggttcgtcagcactgccgaggagcaaggctgggtccctgcaacggtgcctcgaagggccaggatgcgcgtgcagggatgaggttttcctctgcagcctgaacgaaaggagaaggtacaacagtcatctacccgtacacagttcggaccacggatgacatgaacctggaaagaggggtgtggtggcgggccttccaaaaacctggacgcttgagactccgtcccgcaaaacggtggcccccctactaaagaacggggcctgcccaagaggcctgcacca

SEQ ID NO: 31 - DNA, 1329 bp, Homo sapiens
  CDS (185)..(787)
tttcgtgtctgcagcgccgagggaggctgccagtgcgtgaggaagagagctagagactggacaggggagacagagcagcgtcggagccgcgcaggggacgggagtgagagcgggagtgagagcaggaacgacgcagagcggccgtcgccgtgcccgggtctcagggcgcctggctgaagtgagcatggcttcagtggcctgggccgtcctcaaggtgctgctgcttctccccactcagacttggagccccgtaggagcaggaaatccacctgactgtgatgccccactggcctctgccttgcctaggtcatccttcagcagctcctcagagctgtccagcagccacggcccggggttttcaaggcttaatcgaagagatggagctggtggctggaccccacttgtgtcaaataaataccaatggctgcaaattgaccttggagagagaatggaggtcactgctgtcgccacccaaggaggatatgggagctctgactgggtgaccagctacctcctgatgttcagtgatggtgggagaaactggaagcagtatcgccgagaagaaagcatctggggttttccaggaaacacaaacgcggacagtgtggtgcactacagactccagcctccctttgaagccaggttcctgcgctttctccctttagcctgggaacccccaggggcaggattgggatgcggattgaagtgtacggatgtgcatataaatctgaggtggtttattttgatggacaaagtgctctgctgtatacacttgataaaaaacctttaaaaccactaagagatgttatttctttgaaatttaaagccatgcagagcaatggaattctacttcacagagaaggacaacatggaaatcacattactctggaattaattaaaggaaagcttgtcttttttcttaactcaggcaatgctaagctgccttccactattgctcctgtgaccctcaccctgggcagcctgctggatgaccagcactggcattccgtcctcatcgagctcctcgacacgcaggtcaacttcaccgtggacaaacacactcatcatttccaagcaaagggagattccagtaacttggatcttaattttgagatcagctttgggggaattccgacacccggaagatcgcgggcattcacacgtaaaagctttcatgggtgtttagaaaatctttattataatggagtggatgttaccgaattagccaagaaacacaaaccacagatcctcatgatggagttggctcatgggttgcaggaccaaaacctgaaaatatctctgactgtgtgtcaccagaccacacaatga

SEQ ID NO: 32 - DNA, 912 bp, Homo sapiens
  CDS (332)..(574)
tggcgaaccgcgaccggaatccctggtcgacgatttcgcgccccgccctggtccagtgattgatcagcagtgattactgaggctttaatggcccgcttggatgggaattaattctgggatggataaataatgcatcgaggtttatgtagtccaaggcgagccgtccgtccggagccaggagaggtagccgagggagcctgacgggtgacgccagcggccacggggccccgaacgagcaggacatgaggggcgactaggcgcgaggacgagcaaaagcaagtggatgacagcatgaacggccctgcggggctggccggacggctgcaagaacatgctgagcccaaagatcaggcaggccaggagggcccgctccaaaagcctagtgatgggggagcagagccggagccctgggcggatgccgtgccctcacaggctgggccccgtgctgaaggcgggctggctgaagaagcagaggagcatcatgaagaactggcagcagcgctggtttgtgctgcgtggggatcagcttttctactacaaggacaaagatgagatcaagccccaggagaataagtgagggaagctcagcaataaggagccatagaagattgatttaaagtttgatgtgattgagtaaaagcttgagactggtggggagaaagtcaagatggatgggaaagcacatgcacttctaggagtggaacattaatattggacagtcggaaaccagaaatctttaagaaagaggaaacctcaggggaagaaagagaggccatcctatcccataacttgaaagtcacaggaatatttcagcctgcagggaatcttcatttcccagcccattgtttaccaaacttgcacgtcaaaaacaaaaacaaaaaataaaatgttgctttcatgaaaaaaaaaaaa

SEQ ID NO: 33 - DNA, 2596 bp, Homo sapiens
  CDS (61)..(1428)
gaccaccttcagcaacttgaacatgaggtggacccccctttcacttccaggaaggtacatatggaaactacagtgtccagaccggtcctttctccaacccacatcaacgctacagcttctgaaacattcacagtacttcagcaaaggatgagaatagttgaggaacagaccagttcactgagggatgacctaataatgttggattttggtgaaaaaaggtcccatgtaaacagtataaaggaaagaacgtcatcagttggtttgcctagtgttattccaaactctacacgccgtgtgagctttgcacctaacctgccttctatgaaaacatctcaggatattggagactctaggatctctctaaagactcttttgaatgctattaaaaccatggagggaagactggaaggcaaaatagagattctagcctcaagacctttaataaatgatgaatcaccaaattttcttaaacaggactcggtgaaatctattcttgaaagaagtaaagaggagctgtcccgaacagtgaagtgtcgtaatgcggccctgaaagagagtcagaagttgaaagaagacctcgaggctgtggaggacagggaaaacaagaaggcaaggaatcagtcccttctgaccgtgggaaactttcagcgacaattggcagaagctaaagaagacaactgcaaagtcacaatcatgttggagaatgtgctggcttctcacagtaagatgcaaggtgctctggagaaagtacaaatagagcttgggcggagggattcagagattgcaggcctcaagaaagaaagggatctcaatcaacagagggtgcagaagctggaagctgaagtggaccagtggcaggccaggatgcttgtcatggaggaccagcacaacagtgagattgaatctctacaaaaagctctaggtgtagctagagaagacaacaggaaacttgctatgagtctggaacaagctctccagacaaataatcatctgcaaacaaagctagatcacattcaagagcaattggaaagcaaagaacttgagcgacagaatttggaaaccttcaaagaccggatgactgaagagtccaaagtggaagcagaattgcatgctgaacgcatagaagctctaagaaagcagtttcaaaccgagagagaaactacaaagaaagtggcacaacgggaagtggctgagctgaagaaagcccttgatgaagctaacttcagatcagtggaagtgtcccggaccaaccgagagctgcgacagaaacttgcagagctagaaaaaatactagaaagtaacaaggagaaaataaagaatcaaaagacccaaattaagctccacttgtcagctaaggcgaataatgctcagaatatagaaaggatgaaggttgtatgggaaacctcttctcacttcctggataccctgtgaggatgtagtcagtcaatggtgtctagggaagacaggttttagaaccctaccagccccatgtattctctgggaattatagccagttgtctttggggagactttttcagtggagtcactgctgtgtaaatgtttgatttctcatttgctgccagtgtcacattccggctccctatctgtcccttccgtgttgattgtactggactttgctcttttgggatcagtgggctagatgggaaagaaagctcagcaggaactggtaactttgggtctcatattggattctttctgtcatcctataggcaaaaagagcaagccagtttttccactgatcatctttttatgttattttccaattacttttagcaaatagaaaaagaattgaagcaaatggagctaattaaggatcaatatcaaaaaaagaactatgaacagtctttgagtatccagagatttgtgtgtgaaatgactaacctgcagaaagagatgcagatgttggctaagagccaatatgatgcctcagtgcggaataaacagcaagagctgcacctagaagcagagcggaaaataaggcaggagctagagaatcggtgccaggaattggaagaaactgtcagacacctgaagaaatgtaaagaggcaacagagaatacgctgaaagaagccagtgtggaatcagaacagataacagctaatctggaagaagctcatcgctggtttaagcacaggtttgatggtctacaacttgagctgacaaaaaaccggttgcagaggccttctggggaagacaggtggcaggaaaaggaccaagatgtaaaacatgatgtcatgtccaaccaatctgttctgcatcgatgggagagaaaacagaatcttaggcccatgcccaagaagtatcattctgaggtacagaggaagtgatgtccttgacaagggagcttctttatgtgtagctacactccatgattccaagagcccagcagccggggctggcctgtttctagagtcataagaacatgaagtctttgatgtgggctgaagattttggacctgagtttatcactttatgaactcttatatcagtacaaaactacccctttttttgtcccttttcacattttccacccaataaatttgtgttaatttgttgtatgataaaaaaaaaaaa

SEQ ID NO: 34 - DNA, 4714 bp, Homo sapiens
  CDS (1)..(4143)
atgggcataaaaccagccagcttcaataaagtcactgatcctgaagtcaaagaaatcattgaaggatgtattcgtcaaaacaaatctgaaaggttgtctatcagggacctattaaaccatgcattttttgctgaggatacaggactgagggtggagttagcagaagaagatgattgctcaaattcatcccttgctttaagactctgggttgaagaccctaaaaaattgaaaggcaaacacaaagacaatgaagctattgaatttagtttcaacttagaaacagatacacctgaggaagtagcatatgaaatggtcaagtctgggttcttccatgaaagtgattccaaagctgttgctaaatccattagagaccgggtgacgccaataaagaagacaagagagaagaagcctgctggctgtttggaagaacgcagggattctcagtgcaagtctatggggaatgtattccctcagccccagaatacaactttaccccttgctcccgctcagcaaactggggctgaatgtgaagaaactgaagttgatcaacatgttagacaacagcttctacaaagaaaaccacagcagcactgctcctctgttacaggtgacaatttgtctgaggcaggagctgcatcagttatacattcagatacttcaagtcagcccagtgtagcctattcctcaaatcaaacgatgggctctcaaatggtttctaatatcccgcaggctgaagtaaatgttccagggcaaatttattcatctcagcaactagtaggacattaccagcaagtttcagggttacagaagcattcaaagctgactcagccgcagattttgcctttggttcaaggtcagtccactgttttacctgtacatgtccttggaccgacagttgtttcacaaccccaggtttccccattaactgttcagaaggtcccacagataaagcctgtatcccaaccagttggagctgaacaacaagcagctcttctaaaaccagatttagttcgaagcttgaatcaagatgtggcaactacgaaggaaaacgtcagtagccctgataacccaagtggaaatggcaaacaggatcggatcaaacagagaagagcttcctgtccccgaccagagaaggggactaaatttcagcttaccgtccttcaggtatcaacctctggagataacatggtagagtgtcagctggagacacacaacaacaagatggtcaccttcaagtttgatgttgatggtgatgcgccagaggatattgcagactatatggttgaagataactttgtgctggaaagtgagaaagaaaaatttgtagaagaattgagagctattgtaggtcaagcccaggagatccttcatgtccactttgccacagaaagagccactggagttgattctattactgtggactccaacagtagccagacagggtcatctgaacaagtacagataaattctacatctactcaaaccagcaatgaatctgctcctcagtcatccccagttggtcggtggcgattctgtatcaatcagacgataagaaaccgtgagactcagtctcctccttctcttcagcattccatgtctgcggttcctggccgacatccacttcctagtccaaaaaacacaagtaataaggaaatatcacgggacacattgctcactatagaaaataatccatgccaccgtgcacttttcacctccaaatcagaacacaaggatgtggttgatggtaagatttctgaatgtgctagtgtagaaaccaagcagccagctatactttatcaagtggaagataacaggcagataatggcaccagttactaatagttccagttactctactacttcagttcgtgcagttccagctgaatgtgagggactcaccaaacaagcaagcatattcatacctgtgtatccatgtcaccaaactgccagtcaggctgatgcacttatgtcccatcctggcgaatcaactcagacttctggtaactctcttacaactctggcatttgatcaaaagcctcaaaccttatcagtacagcagccagctatggatgcagagtttatttctcaagaaggagaaactacagtgaacactgaagcaagttctcctaagacagtcattcccactcagacccctggccttgaaccaactacccttcaacccactactgtcctggaatcagatggagaaagacctccaaaactggagtttgcagacaaccgaattaaaactctggatgaaaaattaagaaacttgctctatcaggagcacagcatctctagcatctatcccgagagtcagaaggatacccaaagcatagactctccattttcttcctctgctgaagataccctctcctgtccagtgacagaagtcatagccatcagtcactgtggaattaaagatagccctgtacaatcccctaatttccaacagacaggctctaagcttctgtccaatgtggctgcaagtcagcctgctaatatatcagtgttcaaaagggacctgaatgtgataacttctgtatccagcgaattgtgtttacatgagatgtcctcagatgcttcacttccaggggatccagaggcctatcctgctgctgtgtcaagcggtggagccattcatctgcagacaggagtggaaacagaagagatgagatcagcaattgctcctgatcccattcctctgacacgggagtccacagctgatactagggctttgaatagatgtaaagcgatgagtggatcatttcagcggggtcggttccaggtgattacaattcctcagcagcagtcagcaaaaatgacatcttttggaatagaacacatatcagtgttcagtgagacaaaccattctagtgaagaagcctttattaaaacagcaaagtctcagttggtagaaatagaacctgccacacaaaatccaaaaacttcgttttcttatgagaagttacaagctcttcaggaaacctgtaaagaaaataaaggagttcccaaacaaggtgacaacttcttatctttcagcgcagcttgtgagactgatgtatcttcagtgaccccagaaaaggaatttgaagaaacttcagccacaggaagtagcatgcagtctggatctgaactgttgcttaaagagagagagatattgactgctgggaaacagcctagctctgatagtgaattttcagccagtcttgctggcagtggaaagtcagtggcaaagactggtccagagagtaatcagtgcttaccacaccacgaagaacaagcttatgctcaaacacagagttcactcttctattcgccatcttccccaatgagcagtgatgatgaatcagaaatagaggatgaggacttgaaggtggagcttcaaagattacgagaaaaacacattcaggaggtggtaaatcttcaaacccagcagaataaggagctgcaggagctctatgaacgccttcggtcaattaaagatagcaaaacccaatctactgagattcctttgccacctgcatcaccacgtcgaccaagatctttcaaaagcaaacttcgaagccgcccccagtccttgacacatgtggacaatggcatagttgctacagatccactgtgtgtggagagtaatgcagcatcatgccaacagtctccagccagtaaaaaagggatgttcacagatgacttacacaagctggtggatgactggacaaaggaagcagtaggaaattctcttattaagccaagtttaaaccaacttaaacaaagtcaacacaaactagagacagaaaactggaataaagtatctgaaaatactccgtctactatgggctacacatcaacatggatttcttctctgtcccaaatccgtggagctgtcccaacttccttgccacaaggactctcactcccttcatttcctgggccattatcatcatatggaatgcctcacgtttgtcagtataatgctgtggcgggggcggggtatccagtacagtgggtaggaatttcaggaacaacacaacaatctgtagtaattcccgcccaatctgggggaccattccagccagggatgaatatgcaggcatttccaacttcatcagtgcagaatcctgccacaatccctcctggtcctaaatgaatcagagtagatggtgataaaaagggaggttttttcagaattattttcaggacacccaagatattaaagtttcttcctcttgggttctgtcatattttccctcatttgagtttactttagactatatattttttgttccagtgtggtatttgatacagctcatcattctgtagaaatgtgcagtttgcagatagaacactgcacacagaaatgttttttcacttcaaattctatcctctttgatacttgattttttaaaaatactgttcagaatgctttaataagctcagcttgagcattaccatttccaggacactttccatgaattgttgagaagctccccatcccccgcctttttttttttttttttaactgctgctatctgcagctggatactcttctttaaaaatgtttaaaaattatttagattgattctccccaaatgtggatgaactgagaccctccatcagccagagtcttatgggatcttcacttcacatgtttgtcttaggtttacctttcacagaaggcagggtaacttgctgcaggaaacgttttggtgtataaa

SEQ ID NO: 35 - DNA, 1567 bp, Homo sapiens
  CDS (375)..(1034)
  misc_feature (1)...(1567): n = a,t,c or g
atagatcattttctgtaacaggtgacaaaagcagaaaagaatgaagaggctgaagtatgaactacccttggagcccatatacatgatataggcaatttcttttgtatgttaattcagtcaaaaatactacccacttgatgttttctaatctgatgtgagctcatgttacacagacttttagtaagtaacccgtgactagaaaataaactggatgcttaggagagagtgtcagatgtataagatgctaataaaacctgtttaatattattgttagctgtaagtttttgggctgctctgttcataagggctttgccttcgttcagtatgttaatgagagaaatgcccgggctgctgtagcaggagaggatggcagaatgattgctggccaggttttagatattaacctggctgcagagccaaaagtgaaccgaggaaaagcaggtgtgaaacgatctgcagcggagatgtacggctcctcttttgacttggactatgactttcaacgggactattatgataggatgtacagttacccagcacgtgtacctcctcctcctcctattgctcgggctgtagtgccctcgaaacgtcagcgtgtatcaggaaacacttcacgaaggggcaaaagtggcttcaattctaagagtggacagcggggatcttccaagtctggaaagttgaaaggagatgaccttcaggccattaagaaggagctgacccagataaaacaaaaagtggattctctcctggaaaacctggaaaaaattgaaaaggaacagagcaaacaagcagtagagatgaagaatgataagtcagaagaggagcagagcagcagctccgtgaagaaagatgagactaatgtgaagatggagtctgaggggggtgcagatgactctgctgaggagggggacctactggatgatgatgataatgaagatcggggggatgaccagctggagttgatcaaggatgatgaaaaagaggctgaggaaggagaggatgacagagacagcgccaatggcgaggatgactcttaagcacatagtggggtttagaaatcttatcccattatttctttacctaggcgcttgtctaagatcaaatttttcaccagatcctctcccctagtatcttcagcacatgctcactgttctccccatccttgtccttcccatgttcattaattcatattgccccgcgcctagtcccattttcacttcctttgacgctcctagtagttttgttaagtcttaccctgtaatttttgcttttaattttgatacctctttatgacttaacaataaaaaggatgtatggtttttatcaactgtctccaaaaataatctcttggtatgcagggagtaccagttctcttcattcatacataagttcagtagtggcttccttaactgcanagggcatctcantttagtgagtagctcttgggaagcagctttgagtagaangtatgtgtgtacacccttacattagtgtgctgtgtggggcagtcaacacanatggtacatgtattntgtgatgagagtggcatgtcaatgcatctctagaa

SEQ ID NO: 36 - DNA, 3260 bp, Homo sapiens
  CDS (87)..(2315)
tgctggagcagctgctcccagagctcaccgggctgctcagcctcctggaccacgagtacctcagcgataccaccctggaaaagaagatggccgtggcctccatcctgcagagcctgcagccccttccagctggcatgtcccccttcttcctcacagcaaaggaggtctcctacctgtatgtgaacacagcagacctccactcggggcccagcttcgtggaatccctctttgaagaatttgactgtgacctgagtgaccttcgggacatgccagaggatgatggggagcccagcaaaggagccagccctgagctagccaagagcccacgcctgagaaacgcggccgacctgcctccaccgctccccaacaagcctccccctgaggactactatgaagaggcccttcctctgggacccggcaagtcgcctgagtacatcagctcccacaatggctgcagcccctcacactcgattgtggatggctactatgaggacgcagacagcagctaccctgcaaccagggtgaacggcgagcttaagagctcctataatgactctgacgcaatgagcagctcctatgagtcctacgatgaagaggaggaggaagggaagagcccgcagccccgacaccagtggccctcagaggaggcctccatgcacctggtgagggaatgcaggatatgtgccttcctgctgcggaaaaagcgtttcgggcagtgggccaagcagctgacggtcatcagggaggaccagctcctgtgttacaaaagctccaaggatcggcagccacatctgaggttggcactggatacctgcagcatcatctacgtgcccaaggacagccggcacaagaggcacgagctgcgtttcacccagggggctaccgaggtcttggtgctggcactgcagagccgagagcaggccgaggagtggctgaaggtcatccgagaagtgagcaagccagttgggggagctgagggagtggaggtccccagatccccagtcctcctgtgcaagttggacctggacaagaggctgtcccaagagaagcagacctcagattctgacagcgtgggtgtgggtgacaactgttctacccttggccgccgggagacctgtgatcacggcaaagggaagaagagcagcctggcagaactgaagggctcaatgagcagggctgcgggccgcaagatcacccgtatcattggcttctccaagaagaagacactggccgatgacctgcagacgtcctccaccgaggaggaggttccctgctgtggctacctgaacgtgctggtgaaccagggctggaaggaacgctggtgccgcctgaagtgcaacactctgtatttccacaaggatcacatggacctgcgaacccatgtgaacgccatcgccctgcaaggctgtgaggtggccccgggctttgggccccgacacccatttgccttcaggatcctgcgcaaccggcaggaggtggccatcttggaggcaagctgttcagaggacatgggtcgctggctcgggctgctgctggtggagatgggctccagagtcactccggaggcgctgcactatgactacgtggatgtggagaccttaaccagcatcgtcagtgctgggcgcaactccttcctatatgcaagatcctgccagaatcagtggcctgagccccgagtctatgatgatgttccttatgaaaagatgcaggacgaggagcccgagcgccccacaggggcccaggtgaagcgtcacgcctcctcctgcagtgagaagtcccatcgtgtggacccgcaggtcaaagtcaaacgccacgcctccagtgccaatcaatacaagtatggcaagaaccgagccgaggaggatgcccggaggtacttggtagaaaaagagaagctggagaaagagaaagagacgattcggacagagctgatagcactgagacaggagaagagggaactgaaggaagccattcggagcagcccaggagcaaaattaaaggctctggaagaagccgtggccaccctggaagctcagtgtcgggcaaaggaggagcgccggattgacctggagctgaagctggtggctgtgaaggagcgcttgcagcagtccctggcaggagggccagccctggggctctccgtgagcagcaagcccaagagtggggaaactgcaaataaaccccagaacagcgttccagagcaacctctccctgtcaactgtgtctctgagctgaggaagaggagcccatccatcgtagcctccaaccaaggaagggtgctacagaaagccaaggaatgggaaatgaagaagacctaggaagaggatgaggatttcattccaaaggaaataccagcttgtccacctgaggaagaaatgcttttttcacaaggagacaccaagagaagactaggaagtagccctcgttctccagggcacccaaaataccagcctttattgtctgcatgattttaggggatatggggagggaacaagtagaagggaagagggaaatggagagcatccttatgactttacaaagggtggaaatgaggatggagggatacagaagtctgcacagctgtaaaggttttatagatgtctttgccttcccttctgaggaagggaagaagtaatgaaagcacatgtgaataaccccttccatcccattcacagcatcgcactcccagtccttaaggcaaagggaggcagtgctgaagcattggtggtgcagtgtaaagagacaagacctgatcatctgatcacacttgtgccaacttgattcatattgggcattactaacaacccctggtcaaggtaaataggttgaacaatcaataacattatccctgcctgcatacatgtgaacaaaagctatagaggacatgcaaattctacagtcattcctcatatgctttagacagagtgcagctactggaatcttccagatttcagtgttttaaaatcagagctctgaatacacaaaaggaaagagaaatggagcagctgacatattttaagctcacagtgatactcagtgacaggagcacagagctctaatgtccacaggatgttgtagggtagggtctctcagtaaatcaagtcccttacctatgttctgacactgaggctcttggagctatgggttagaaatccaggaggcaatgtctttattctaatgaagtcctcatcttgcactcagaggcccactagtttgcccttctatatattaagtaaaaccaagagaaattaaaaaaaaaa

SEQ ID NO: 37 - DNA, 1165 bp, Homo sapiens
  CDS (355)..(1071)
gctctcatattttcaaaggaagccggaaacctggacttttaaagtgaaatacccaccccccacaacatttaagtactgactaataatttttagaaacaacataggccaaacaaaacacataggtggctccgagtttgtaggtagcctgtggtttaatatctttctctcccatttaactcagctccacggggcacatggcatctccctctgctcatcatagtgtttggatcaaacaaatgaaaaacagaaacatgacggcctctaccagcaaaagctcgagggttggaaagagtcccctggcagggaattggcaccccgtcgtgcctatcctctctctctgactgcctgctggaaatgcccccatctccctttgagtcctcctcccgggcgactcctgtgacctgtaacctctgtcctgaaatcatcacaatggccagggtggcctcagctcaaggcctctgtgacatcaccaagggcctggcaccaggtgcccagtcttccagttgcgagggcaagcaaacccgtcatgagcaactcccttccccatctctgctcaccatgtggacgctgaaatcgtccctggtcctgcttctgtgcctcacctgcagctatgcctttatgttctcttctctgagacagaaaactagcgaaccccaggggaaggtgcaatacggagagcactttcggattcggcagaatctaccagagcacacccaaggctggcttgggagcaaatggctctggcttctttttgttgttgtgccgtttgtgatactgcagtgtcaaagagacagtgagaagaataaggagcagagtcctcctggccttcgaggcggccaacttcactctccattaaagaaaaaaagaaatgcttcccccaacaaagactgtgcattcaataccttaatggaactcgaggtggagcttatgaaatttgtgtccaaagtgcggaatcttaaacgtgccatggcaacaggtagtggcagtaacctcaggcttcgaaagtcagagatgcctgcagatccataccatgtcacgatctgtgaaatatggggagaagaaagctctagctgaatggatttgtgtgtcaggagagaaaaaagttgagtgttgacaaactgtatgcaaactaataaaactattctgaagaaaagaaaaaaaaaaa

SEQ ID NO: 38 - DNA, 969 bp, Homo sapiens
  CDS (34)..(765)
acgtctgtggcgccctcgcaccgcgccgcagccatggccctggtgaccctgcagcgctcgcccacgcccagcgccgcctcctcctcggccagcaacagcgagttggaggctggcagcgaagaagatcgaaaattaaacctcagcttaagtgagagctttttcatggtgaaaggcgcagccctcttcttacaacagggaagcagccctcaaggccagcggagtcttcagcacccccacaagcatgcaggtgatctgcctcaacatcttcaggtgatgatcaaccttctgcgttgcgaagacagaatcaagctggcagtgcgcctggagagcgcctgggcggaccgggtccggtacatggtggtggtgtacagcagcgggcgccaggacaccgaggagaatatcttgctgggagtggacttttccagtaaggaaagtaaaagctgcaccattgggatggttctccgactgtggagcgacacgaaaatccaccttgatggagatggtgggttcagcgtgagcacagcaggaaggatgcacatatttaagcctgtgtctgtccaggccatgtggtctgccctgcaggtgcttcacaaggcctgcgaagtggcccggaggcacaactacttccccgggggtgtagctctcatctgggctacctactatgagagctgcatcagctccgagcagagctgcatcaacgagtggaacgccatgcaggacctggagtctacgcggcccgactcccccgcgctatttgtggacaagtaagtgaggtgcctctggtgtgagcgcacccaagcccacaggcacctgcctctcccccacctgccctgtgcccgaccctgaacctgcattgggccacacctcccctggagtcccttgagtgagaaccctagctttctcagaaccagcgtttaaagcaggggtctgtgacacaggcccctgtcccatgcaaaaaaaagaaaaaag

SEQ ID NO: 39 - DNA, 1188 bp, Homo sapiens
  CDS (380)..(1141)
tttcgtgtggagggcacgtgcggagctgtgtctggggtctgcttccatatagaccaccccgagaacaggtgactctcctggcaatgaaacctgggccaccagcccagagaggcctctcaccacagcagggaccaaggctgcctttgtgcaaggcaccagccccaccccccaaggcctgccccagcggctgaacctgaccggagcagtcagggtgctctgtgagatcgagaaggtggttgtcgccatccagaagcgcttcctgcagcaggaatccatccccgagtcctcgttgcacctcagccacccctcctgcaacgtgagccacagcaatggcacacacgtgctcctggaggccggctggagcgagtgtgggaccctcatgcagagcaacatgacgaacaccgtggtgaggaccacgctgaggaacgacctgtcccaggagggcatcatccaccacctgaagatcctgagccccatctactgcgccttccagaatgacctgctgacatcctccggcttcaccctggagtggggggtttacaccatcatcgaggacctccacggcgctgggaattttgttaccgaaatgcagttgtttatcggagactctcccatacctcagaattatagcgtgtctgccagtgacgatgtcaggatcgaagtggggctctacaggcagaaaagcaacctcaaggtggtcctgacggagtgctgggcaaccccgtctagcaacgcccgggaccccatcaccttcagcttcattaacaacagctgccctgtgcccaacacatacaccaacgtgattgagaacggcaactccaataaggcccagttcaagctgaggatcttttcctttatcaacgactccatcgtctacctgcactgcaaactccgcgtctgcatggaatcccccggagccacgtgcaaaatcatctctcacctgtgcctgtctcctccccgaggtgagcctcctcatgcagaagcaggcctgggtgccggttatgtggtccttattgtggtggccatcttcgtgctggtggcgggaacagccacccttctgatcgtgcgctaccagagaatgaatgggagatacaactttaaaatccagtccaacaacttcagctaccaggtgttctacgaataggaggcacaggctgacaggaaggtcgccgtgagtcaagctgcctc

SEQ ID NO: 40 - DNA, 1114 bp, Homo sapiens
  CDS (131)..(952)
gtgtcttccttcccagcttcctccgtgtctggggtgggggatgggggggtctcaggcagggatactctagccccttgactgctgtttagacccagcttgtactgctgctgctccctgcccagccccagccatgaaactgcccaaggggaccaggagctctgtgtactttgcacagcacccagaaaaggagccattgccctcaaggcaggaggtcaagcagacccctgtcatcatggccaagatcaaaggtccggggcccgccaagtacctccggccatcctgcacgggctacatagatcatgacatctccatgttcaaggcaccagcttataccctgcatagccggcactcagagaagcggatggtgtgccacagcagccctgggccttgctatctcttggatcccaaaataactcggtttggaatgtccagctgcccgcaggtccccatggaggagcgcatctccaacctgcgcctgaaccccaccctcgcatcctgccagtactactttgagaagatccacccaccgggggaacgcagggctccccagtacacgtttggctaccggcgcccatacagagtgatggacctcaacccggctcccaaccagtaccagatgccactcttgctggggcccaacacccctgtcagccgagctgctccctgctacagtctggcctccagggacaagaactggttctacaaggaggatgtggcaggaggccctggacctaccacgtacgcccgacctgagccatccatctatcagaaccgcagccctacttacagcatggccaagcgcttcgcctaccctctggacctcacgccacggcctggccccggctcccacgaggtccagcaggtcactgtgcacaagccccacatccctgctttcaccatgggcatcaagcactcactccacctgtgcccactggtcatcgacattcgtgactgaggcccctcttggggcactcactgcccctcatccccagaaattatttttctacaccaaattgagcaatttgaccaagatttctagtagcagagccggtacctgctgagtgtccggcacacagaagacattagagatacattttcatgtaaaaaaaaaaaa

SEQ ID NO: 41 - DNA, 1658 bp, Homo sapiens
  CDS (351)..(1388)
agacaggccgacggtcgcaaggtcctacggtcaagcatccgggagtttctatgcagcgaagccatgttccacctgggagtccccaccacacgggccggcgcctgcgtcacgtccgagtccacggtggtgcgcgacgtgttctatgatggtttggatcctttgagatttttaagtctgcagatgagcacacagggcgtgcaggccccagcgtggggaggaacgacattcgagtgcagctgctcgactatgtcatcagctccttttaccccgagatccaggctgctcatgccagcgacagcgtgcagagaaatgctgccttcttccgggaggtgacgcggcgcacggcgcggatggtggccgagtggcagtgtgtgggcttctgccacggcgtgctcaacaccgacaacatgagcatcctggggctcaccatcgactacgggccctttggcttcctggacaggtacgaccccgaccacgtgtgcaatgcctccgacaacaccggccgctacgcgtacagcaagcagcccgaggtgtgcaggtggaacctgcggaagctggccgaggccctgcagccggaactgcccctggagctgggggaggccatcctggccgaggagtttgacgccgagttccaaaggcactacctgcagaagatgcgcaggaagctgggcctcgtgcaggtggagctggaggaagacggggcgctggtgtccaagctcctggagaccatgcatctgaccggtgccgacttcacaaacaccttctacttgctgagctccttcccagtggagctagagtcgccaggcctggcggaattcctggccaggctgatggagcagtgtgcctccctggaggagctgaggctggccttccggccccagatggatccccggcagctatccatgatgctgatgctggcgcagtcaaacccgcagctgttcgcgcttatgggcacccgggcaggcatcgccagggagctggagcgtgtggagcagcagtctcggctggagcagctgagtgcggcagagctgcagagcaggaaccagggccactgggctgactggctacaggcgtacagagcccggctggacaaggacctggaaggcgctggggacgctgccgcctggcaggctgagcacgtgcgcgtgatgcacgccaacaacccgaagtacgtgctgaggaactacatcgcgcagaatgccatcgaggctgccgagcgcggggacttctcagaggtgcggcgggtgctgaaactactggagaccccttaccactgcgaggcgggggccgccacagacgccgaggccacggaagccgacggggcggacggcaggcagcgctcctacagcagtaagcccccgctctgggcagcagaactgtgcgtgacatgatcttcgtaacggcctcggcacgctccacacccctggagtctcccgaggcccccatgtgctgctgagtggccaagatgatgccaggctgccctatacactgggggattctgccctggcccatgcacacccgtctttccatgatggcagagacatccagtcaggacctgacccgtctctgtctgaggccggctcagcagtgcagcctggtccctgggggctggacccaggctcctaaataaaccagcaactccctcgaaaaaaaaaaaa

SEQ ID NO: 42 - DNA, 2499 bp, Homo sapiens
  CDS (1)..(2145)
atggagcgcacagcaggcaaagagctggccctggtaaggggacaagggatccccggaccccgcatccctggtgacccgcaggcaccgctgcaggactggggtgaagagaccgaggacggcgcggtgtacagtgtctccctgcggcggcagcgcagtcagcgcaggagcccggcggagggccccgggggcagccaggctcccagccccattgccaataccttcctccactatcgaaccagcaaggtgagggtgctgagggcagcgcgcctggagcggctggtgggagagttggtgtttggagaccgtgagcaggaccccagcttcatgcccgccttcctggccacctaccggacctttgtacccactgcctgcctgctgggctttctgctgccaccaatgccaccgcccccacctcccggggtagagatcaagaagacagcggtacaagatctgagcttcaacaagaacctgagggctgtggtgtcagtgctgggctcctggctgcaggaccaccctcaggatttccgagacccccctgcccattcggacctgggcagtgtccgaacctttctgggctgggcggccccagggagtgctgaggctcaaaaagcagagaagcttctggaagattttttggaggaggctgagcgagagcaggaagaggagccgcctcaggtgtggacagactcttcagaggcctgcgcggaggaagaggaagggctcatgcctcaaggtccccagctcctggacttcagcgtggacgaggtggccgagcagctgaccctcatagacttggagctcttctccaaggtgaggctctacgagtgcttgggctccgtgtggtcgcagagggaccggccgggggctgcaggcgcctcccccactgtgcgcgccaccgtggcccagttcaacaccgtgaccggctgtgtgctgggttccgtgctcggagcaccgggcttggccgccccgcagagggcgcagcggctggagaagtggatccgcatcgcccagcgctgccgagaactgcggaacttctcctccttgcgcgccatcctgtccgccctgcaatctaaccccatctaccggctcaagcgcagctggggggcagtgagccgggaaccgctatctactttcaggaaactttcgcagattttctccgatgagaacaaccacctcagcagcagagagattcttttccaggaggaggccactgagggatcccaagaagaggacaacaccccaggcagcctgccctcaaaaccacccccaggccctgtcccctaccttggcaccttccttacggacctggttatgctggacacagccctgccggatatgttggagggggatctcattaactttgagaagaggaggaaggagtgggagatcctggcccgcatccagcagctgcagaggcgctgtcagagctacaccctgagcccccacccgcccatcctggctgccctgcatgcccagaaccagctcaccgaggagcagagctaccggctctcccgggtcattgagccaccagctgcctcctgccccagctccccacgcatccgacggcggatcagcctcaccaagcgtctcagtgcgaagcttgcccgagagaaaagctcatcacctagtgggagtcccggggacccctcatcccccacctccagtgtgtccccagggtcacccccctcaagtcctagaagcagagatgctcctgctggcagtcccccggcctctccagggccccagggccccagcaccaagctgcccctgagcctggacctgcccagcccccggcccttcgctttgcctctgggcagccctcgaatccccctcccggcgcagcagagctcggaggcccgtgtcatccgcgtcagcatcgacaatgaccacgggaacctgtatcgaagcatcttgctgaccagtcaggacaaagcccccagcgtggtccggcgagccttgcagaagcacaatgtgccccagccctgggcctgtgactatcagctctttcaagtccttcctggggaccgggtgctcctgattcctgacaatgccaacgtcttctatgccatgagtccagtcgcccccagagacttcatgctgcggcggaaagaggggacccggaacactctgtctgtctccccaagctgaggcagccctgtcctctccacaagacacaagtcccacaggcaagcttgcgactcttctcctggaaagctgccatcccccagtagaggccactgtgctgtgtatcccaggaccaccacccaactgtagcccattggaccccatctctttttctgactctgttggtactagatccatattccaaagacatcagcccatgggtggctggtggagagctcaatcccataaatgtagaaagaggtggggcatggatacgtcaaatccctccccagagaaatcttataaatgttagagacgcatcagaagtgacagatgcggatgaaaatagtgaccagagttatgaaaaaaaaaaaa

SEQ ID NO: 43 - DNA, 2451 bp, Homo sapiens
  CDS (1)..(2097)
atggagcgcacagcaggcaaagagctggccctggtaaggggacaagggatccccggaccccgcatccctggtgacccgcaggcaccgctgcaggactggggtgaagagaccgaggacggcgcggtgtacagtgtctccctgcggcggcagcgcagtcagcgcaggagcccggcggagggccccgggggcagccaggctcccagccccattgccaataccttcctccactatcgaaccagcaaggtgagggtgctgagggcagcgcgcctggagcggctggtgggagagttggtgtttggagaccgtgagcaggaccccagcttcatgcccgccttcctggccacctaccggacctttgtacccactgcctgcctgctgggctttctgctgccaccaatgccaccgcccccacctcccggggtagagatcaagaagacagcggtacaagatctgagcttcaacaagaacctgagggctgtggtgtcagtgctgggctcctggctgcaggaccaccctcaggatttccgagacccccctgcccattcggacctgggcagtgtccgaacctttctgggctgggcggccccagggagtgctgaggctcaaaaagcagagaagcttctggaagattttttggaggaggctgagcgagagcaggaagaggagccgcctcaggtgtggacagactcttcagaggcctgcgcggaggaagaggaagggctcatgcctcaaggtccccagctcctggacttcagcgtggacgaggtggccgagcagctgaccctcatagacttggagctcttctccaaggtgaggctctacgagtgcttgggctccgtgtggtcgcagagggaccggccgggggctgcaggcgcctcccccactgtgcgcgccaccgtggcccagttcaacaccgtgaccggctgtgtgctgggttccgtgctcggagcaccgggcttggccgccccgcagagggcgcagcggctggagaagtggatccgcatcgcccagcgctgccgagaactgcggaacttctcctccttgcgcgccatcctgtccgccctgcaatctaaccccatctaccggctcaagcgcagctggggggcagtgagccgggaaccgctatctactttcaggaaactttcgcagattttctccgatgagaacaaccacctcagcagcagagagattcttttccaggaggaggccactgagggatcccaagaagaggacaacaccccaggcagcctgccctcaaaaccacccccaggccctgtcccctaccttggcaccttccttacggacctggttatgctggacacagccctgccggatatgttggagggggatctcattaactttgagaagaggaggaaggagtgggagatcctggcccgcatccagcagctgcagaggcgctgtcagagctacaccctgagcccccacccgcccatcctggctgccctgcatgcccagaaccagctcaccgaggagcagagctaccggctctcccgggtcattgagccaccagctgcctcctgccccagctccccacgcatccgacggcggatcagcctcaccaagcgtctcagtgcgaagcttgcccgagagaaaagctcatcacctagtgggagtcccggggacccctcatcccccacctccagtgtgtccccagggtcacccccctcaagtcctagaagcagagatgctcctgctggcagtcccccggcctctccagggccccagggccccagcaccaagctgcccctgagcctggacctgcccagcccccggcccttcgctttgcctctgggcagccctcgaatccccctcccggcgcagcagagctcggaggcccgtgtcatccgcgtcagcatcgacaatgaccacgggaacctgtatcgaagcatcttgctgaccagtcaggacaaagcccccagcgtggtccggcgagccttgcagaagcacaatgtgccccagccctgggcctgtgactatcagctctttcaagtccttcctggggaccgggtcgcccccagagacttcatgctgcggcggaaagaggggacccggaacactctgtctgtctccccaagctgaggcagccctgtcctctccacaagacacaagtcccacaggcaagcttgcgactcttctcctggaaagctgccatcccccagtagaggccactgtgctgtgtatcccaggaccaccacccaactgtagcccattggaccccatctctttttctgactctgttggtactagatccatattccaaagacatcagcccatgggtggctggtggagagctcaatcccataaatgtagaaagaggtggggcatggatacgtcaaatccctccccagagaaatcttataaatgttagagacgcatcagaagtgacagatgcggatgaaaatagtgaccagagttatgaaaaaaaaaaaa

SEQ ID NO: 44 - protein, 517 aa, Homo sapiens
MYEGKHIHFSEVDNKPLCSYSPKLCKQRRLNGYAFCIRHVLEDKTAPFKQCEYVAKYNSQRCTNPIPKSEDRRYCNSHLQVLGFIPKKERKKKNDPIDEVKVRHQMDTMAFSLTVPTLALKMPNGLDGMSLSPPGARVPLHYLETELEDPFAFNEEDDDLKKGATVRKKLQSKLAQNRQRQRETEILKVRQEHFSPPPAPSQQQPPQQHSHLSPLSTSLKPPAPPQGSVCKSPQPQNTSLPMQGVAPTTHTIAQARQLSHKRPLPLLPSSRAPTVDPPRTDRILMKATAFSPHFSCISRLQRLVKLCTQKHQLDTDLFPHLGLDWSEESGEEPEDSEQASPYQVAWSIRETLRYQRHVSDDDDAESRSSRVTQLCTYFQQKYKHLCRLERAESRQKKCRHTFRKALLQAASKEPECTGQLIQELRRAACSRTSISRTKLREVEPAACSGTVKGEQCANKALPFTRHCFQHILLNHSQQLFSSCTAKFADGQQCSVPVFDITHQTPLCEEHAKKWIIP

SEQ ID NO: 45 - protein, 484 aa, Homo sapiens
MACRGGAGNGHRASATLSRVSPGSLYTCRTRTHNICMVSDFFYPNMGGVESHIYQLSQCLIERGHKVIIVTHAYGNRKGIRYLTSGLKVYYLPLKVMYNQSTATTLFHSLPLLRYIFVRERVTIIHSHSSFSAMAHDALFHAKTMGLQTVFTDHSLFGFADVSSVLTNKLLTVSLCDTNHIICVSYTSKENTVLRAALNPEIVSVIPNAVDPTDFTPDPFRRHDSITIVVVSRLVYRKGIDLLSGIIPELCQKYPDLNFIIGGEGPKRIILEEVRERYQLHDRVRLLGALEHKDVRNVLVQGHIFLNTSLTEAFCMAIVEAASCGLQVVSTRVGGIPEVLPENLIILCEPSVKSLCEGLEKAIFQLKSGTLPAPENIHNIVKTFYTWRNVAERTEKVYDRVSVEAVLPMDKRLDRLISHCGPVTGYIFALLAVFNFLFLIFLRWMTPDSIIDVAIDATGPRGAWTNNYSHSKRGGENNEISETR

SEQ ID NO: 46 - protein, 206 aa, Homo sapiens
MRSIPIATACTIYHKFFCETNLDAYDPYLIAMSSIYLAGKVEEQHLRTRDIINVSNRYFNPSGEPLELDSRFWELRDSIVQCELLMLRVLRFQVSFQHPHKYLLHYLVSLQNWLNRHSWQRTPVAVTAWALLRDSYHGALCLRFQAQHIAVAVLYLALQVYGVEVPAEVEAEKPWWQVFNDDLTKPIIDNIVSDLIQIYTMDTEIP

SEQ ID NO: 47 - protein, 465 aa, Homo sapiens
MMARRDPKPGAKRLVRAQTLQKQRRAPVGPRAPPPDEEDPRLKCKNCEAFGHTARSTRCPMKCWKAALVPPNFGEKEGKENLKPWKPQVEANPGPLNKDKGEKEERPRPQDPQRKALLHIFSGKPPEKPLPNQKGSTESSDYLRVASGPMPVHTTSKRPRVDPVLSDRSATEMSDRGSVLASLSPLRKASLSSSSSLGPKERQTGAAADIPQTAVRHQGPEPLLVVKPTHSSPEGGCREVPQAASKTHGLLQAVRPQAQDKRPAVTSQPCPPAATHSLGLGSNLSFGPGAKRSAPAPIQACLNFPKKPRLGPFQIPESAIQGGELGAPENLQPPPAATELGPRTVSPQIGTRTPAQVLSGDRQPPHSRPCLPTAQACTMSHHPAASHDGAQPLRVLFRRLENGRWSSSLLTAPSFHSPEKPGAFLAQSPHVSEKSEGPCVRVPPSVLYEDLQVPSSSEDSDSDLE

SEQ ID NO: 48 - protein, 298 aa, Homo sapiens [sequence omitted]

SEQ ID NO: 49 - protein, 520 aa, Homo sapiens
MADRSRQKCMSQSLDLSELAKAAKKKLQALSNRLFEELAMDVYDEVDRRENDAVWLATQNHSTLVTERSAVPFLPVNPEYSATRNQGRQKLARFNAREFATLIIDILSEAKRRQQGKSLSSPTDNLELSLRSQSDLDDQHDYDSVASDEDTDQEPLRSTGATRSNRARSMDSSDLSDGAVTLQEYLELKKALATSEAKVQQLMKVNSSLSDELRRLQREIHKLQAENLQLRQPPGPVPTPPLPSERAEHTPMAPGGSTHRRDRQAFSMYEPGSALKPFGGHLGDELTTRLQPFHSTELEDDAIYSVHVPAGLYRIRKGVSASAVPFTPSSPLLSCSQEGSRHTSKLSRHGSGADSDYENTQSGDPLLGLEGKRFLELGKEEDFHPELESLDGDLDPGLPSTEDVILKTEQVTKNIQELLRAAQEFKHDSFVPCSEKIHLAVTEMASLFPKRPALEPVRSSLRLLNASAYRLQSECRKTVPPEPGAPVDFQLLTQQVIQCAYDIAKAAKQLVTITTREKKQ

SEQ ID NO: 50 - protein, 300 aa, Homo sapiens [sequence omitted]

SEQ ID NO: 51 - protein, 353 aa, Homo sapiens
MAFIVPDVNARSFLTINSWPSDNINLTYTASGPSQPPYISYMEAGNQTGFLEFILLGLSEDPELQPFIFGLFLSMYLGTVLGNLLIILAISSDSHLHTPMYFFLSNLSWVDICFSTCIVPKMLVNIQTENKAISYMDCLTQVYFSMFFPILDTLLLTVMAYDRFVAVCHPLHYMIIMNPHLCGLLVFVTWLIGVMTSLLHISLMMHLIFCKDFEIPHFFCELTYILQLACSDTFLNSTLIYFMTGVLGVFPLLGIIFSYSRIASSIRKMSSSGGKQKALSTCGSHLSVVSLFYGTGIGVHFTSAVTHSSQKISVASVMYTVVTPMLNPFIYSLRNKDVKGALGSLLSRAASCL

SEQ ID NO: 52 - protein, 288 aa, Homo sapiens
MCLVTVLGNLLIILAISPDSHLHTPMYFFLSNLSLADIGFTSTTVPKMIVDMQTHSRVISYEGCLTQMSFFVLFACMDDMLLSVMAYDRFVAICHPLHYRIIMNPRLCGFLILLSFFISLLDSQLHNLIMLQLTCFKDVDISNFFCDPSQLLHLRCSDTFINEMVIYFMGAIFGCLPISGILFSYYKIVSPILRVPTSDGKYKAFSTCGSHLAVVCLFYGTGLVGYLSSAVLPSPRKSMVASVMYTVVTPMLNPFIYSLRNKDIQSALCRLHGRIIKSHHLHPFCYMG

SEQ ID NO: 53 - protein, 445 aa, Homo sapiens
MNRTGACRLQGAGGPSLSLETPLCLNCSVLPGDLYPGGARNPMACNGSAARGHFDPEDLNLTDEALRLKYLGPQQTELFMPICATYLLIFVVGAVGNGLTCLVILRHKAMRTPTNYYLFSLAVSDLLVLLVGLPLELYEMWHNYPFLLGVGGCYFRTLLFEMVCLASVLNVTALSVERYVAVVHPLQARSMVTRAHVRRVLGAVWGLAMLCSLPNTSLHGIRQLHVPCRGPVPDSAVCMLVPPRALYNMVVQTTALLFFCLPMAIMSVLYLLIGLRLRRERLLLMQEAKGRGSAAARSRYTCRLQQHDRGRRQVTKMLFVLVVVFGICWAPFHADRVMWSVVSQWTDGLHLAFQHVHVISGIFFYLGSAANPVLYSLMSSRFRETFQEALCLGACCHRLRPRHSSHSLSRMTTGSTLCDVGSLGSWVHPLAGNDGPEAQQETDPS

SEQ ID NO: 54 - protein, 469 aa, Homo sapiens
MTSPVLVDIREEVTCPICLELLTEPLSIDCGHSFCQACITPNGRESVIGQEGERSCPVCQTSYQPGNLRPNRHLANIVRRLREVVLGPGKQLKAVLCADHGEKLQLFCQEDGKEKFQESLKKLKNEEQEAEKLTAFIREKKTSWKARETFSEDVLGQESWQSTNARENAGIPGLEAAHFWIAIPFCAMYLVALVGNAALILVIAMDNALHAPMYLFLCLLSLTDLALSSTTVPKMLAILWLHAGEISFGGCLAQMFCVHSIYALESSILLAMAFDRYVAICNPLRYTTILNHAVIGRIGFVGLFRSVAIVSPFIFLLRRLPYCGHRVMTHTYCEHMGIARLACANITVNIVYGLTVALLAMGLDSILIAISYGFILHAVFHLPSHDAQHKALSTCGSHIGIILVFYIPAFFSFLTHRFGHHEVPKHVHIFLANLYVLVPPVLNPILYGARTKEIRSRLLKLLHLGKTSI

SEQ ID NO: 55 - protein, 195 aa, Homo sapiens
MGRARDAILDALENLTAEELKKFKLKLLSVPLREGYGRIPRGALLSMDALDLTDKLVSFYLETYGAELTANVLRDMGLQEMAGQLQAATHQGSGAAPAGIQAPPQSAAKPGLHFIDQHRAALIARVTNVEWLLDALYGKVLTDEQYQAVRAEPTNPSKMRKLFSFTPAWNWTCKDLLLQALRESQSYLVEDLERS

SEQ ID NO: 56 - protein, 632 aa, Homo sapiens
MTTSALRRQVKNIVHNYSEAEIKVREATSNDPWGPPSSLMSEIADLTFNTVAFTEVMGMLWRRLNDSGKNWRHVYKALTLLDYLLKTGSERVAHQCRENLYTIQTLKDFQYIDRDGKDQGVNVREKVKQVMALLKDEERLRQERTHALKTKERMALEGIGIGSGQLGFSRRYGEDYSRSRGSPSSYNSSSSSPRYTSDLEQARPQTSGEEELQLQLALAMSREEAEKPVPPASHRDEDLQLQLALRLSRQEHEKEVRSWQGDGSPMANGAGAVVHHQRDREPEREERKEEEKLKTSQSSILDLADIFVPALAPPSTHCSADPWDIPGFRPNTEASGSSWGPSADPWSPIPSGTVLSRSQPWDLTPMLSSSEPWGRTPVLPAGPPTTDPWALNSPHYKLPSTGADPWGASLETSDTPGGASTFDPFAKPPESTETKEGLEQALPSGKPSSPVELDLFGDPSPSSKQNGTKEPDALDLGILGEALTQPSKEARACRTPESFLGPSASSLVNLDSLVKAPQVAKTRNPFLTGLSAPSPTNPFGAGETGRPTLNQMRTGSPALGLAGGPVGAPLGSMTYSASLPLPLSSVPAGLTLPASVSVFPQAGAFAPQPLLPTPSSAGPRPPPPQTGTNPFL

SEQ ID NO: 57 - protein, 109 aa, Homo sapiens
MMCCFQKFKILMNTPNVLMLKLHRNANCGLPSLGHLPLYGSSVFTLLNLATALSSGPCLLLLEMSFRPPSTTAVCYRGRPAADFQPSRSSRVSAVLLIQRGAHCCSKSG

SEQ ID NO: 58 - protein, 451 aa, Homo sapiens
MEISGPPFEIGSAPAGVDDTPVNMDSPPIALDGPPIKVSGAPDKRERAERPPVEEEAAEMEGAADAAEGGKVPSPGYGSPAAGAASADTAARAAPAAPADPDSGATPEDPDSGTAPADPDSGAFAADPDSGAAPAAPADPDSGAAPDAPADPDSGAAPDAPADPDAGAAPEAPAAPAAAETRAAHVAPAAPDAGAPTAPAASATRAAQVRRAASAAPASGARRKIHLRPPSPEIQAADPPTPRPTRASAWRGKSESSRGRRVYYDEGVASSDDDSSGDESDDGTSGCLRWFQHRRNRRRRKPQRNLLRNFLVQAFGGCFGRSESPQPKASRSLKVKKVPLAEKRRQMRKEALEKRAQKRAEKKRSKLIDKQLQDEKMGYMCTHRLLLLGRKVVPSDTEGRFRLDRPAPATVSWTGRGFSVSSLLIRSPNPPAFTVEKPDTQVLENLVKAPL

SEQ ID NO: 59 - protein, 463 aa, Homo sapiens
MKKGSQQKIFSKAKIPSSSHSPIPSSMSNMRSRSLSPLIGSETLPFHSGGQWCEQIEIADENNMLLDYQDHKGADSHAGVRYITEALIKKLTKQDNLALIKSLNLSLSKDGGKKFKYIENLEKCVKLEVLNLSYNLIGKIEKLDKLLKLRELNLSYNKISKIEGIENMCNLQKLNLAGNEIEHIPVWLGKKLKSLRVLNLKGNKISSLQDISKLKLLQDLISLILVENPVVTLPHYLQFTIFHLRSLESLEGQPVTTQDRQEAFERFSLEEVERLERDLEKKMIETEELKSKQTRFLEEIKNQDKLNKSLKEEAMLQKQSCEELKSDLNTKNELLKQKTIELTRACQKQYELEQELAFYKIDAKFEPLNYYPSEYAEIDKAPDESPYIGKSRYKRNMFATESYIIDSAQAVQIKKMEPDEQLRNDHMNLRGHTPLDTQLEDKKKKNKYRSRRWSQMNNLKMIT

SEQ ID NO: 60 - protein, 339 aa, Homo sapiens
MNGYGSPYLYMGGPVSQPPRAPLQRTPKCARCRNHGVLSWLKGHKRYCRFKDCTCEKCILIIERQRVMAAQVALRRQQANESLESLIPDSLRALPGPPPPGDAVAAPQPPPASQPSQPQPPRPAAELAAAAALRWTAEPQPGALQAQLAKPDLTEERLGDGKSADNTEVFSDKDTDQRSSPDVAKSKGCFTPESPEIVSVEEGGYAVQKNGGNPESRPDSPKCHAEQNHLLIEGPSGTVSLPFSLKANRPPLEVLKKIFPNQKPTVLELILKGCGGDLVSAVEVLLSSRSSVTGAERTSAEPESLALPSNGHIFEHTLSSYPISSSNGLWDQPFESQTR

SEQ ID NO: 61 - protein, 207 aa, Homo sapiens
MFVYTKQYGLGAQEEDAFVRCVSVLGNLADQLYYPCEHVAWAADARVLHVDSSRWWTLSTTLWALSLLLGVARSLWMLLKLRQRLRSPTAPFTSPLPRGKRRAMEAQMQSEALSLLSNLADLANAVHWLPRGVLWAGRFPPWLVGLMGTTSCLPACTRRPGPAARPRPLPPDTAGRAQGHSQSPRRALPAKQKPPGQGPGLSWSCLW

SEQ ID NO: 62 - protein, 125 aa, Homo sapiens
MPTLDMALFDWTDYEDLKPDGWPSAKKKEKHRGKLSSDGNETSPAEGEPCDHHQYCLTGTCCDLREHFCTPHNRGLNNKCFDDCMCVEGLRCYAKFHRNRRVTRRKGRCVEPETANGDQGSFINV

SEQ ID NO: 63 - protein, 3014 aa, Homo sapiens
MAPPPPPVLPVLLLLAAAAALPAMGLRAAAWEPRVPGGTRAFALRPGCTYAVGAACTPRAPRELLDVGRDGRLAGRRRVSGAGRPLPLQVRLVARSAPTALSRRLRARTHLPGCGARARLCGTGARLCGALCFPVPGGCAAAQHSALAAPTTLPACRCPPRPRPRCPGRPICLPPGGSVRLRLLCALRRAAGAVRVGLALEAATAGTPSASPSPSPPLPPNLPEARAGPARRARRGTSGRGSLKFPMPNYQVALFENEPAGTLILQLHAHYTIEGEEERVSYYMEGLFDERSRGYFRIDSATGAVSTDSVLDRETKETHVLRVKAVDYSTPPRSATTYITVLVKDTNDHSPVFEQSEYRERVRENLEVGYEVLTIRASDRDSPINANLRYRVLGGAWDVFQLNESSGVVSTRAVLDREEAAEYQLLVEANDQGRNPGPLSATATVYIEVEDENDNYPQFSEQNYVVQVPEDVGLNTAVLRVQATDRDQGQNAAIHYSILSGNVAGQFYLHSLSGILDVINPLDFEDVQKYSLSIKAQDGGRPPLINSSGVVSVQVLDVNDNEPIFVSSPFQATVLENVPLGYPVVHIQAVDADSGENARLHYRLVDTASTFLGGGSAGPKNPAPTPDFPFQIHNSSGWITVCAELDREEVEHYSFGVEAVDHGSPPMSSSTSVSITVLDVNDNDPVFTQPTYELRLNEDAAVGSSVLTLQARDRDANSVITYQLTGGNTRNRFALSSQRGGGLITLALPLDYKQEQQYVLAVTASDGTRSHTAHVLINVTDANTHRPVFQSSHYTVSVSEDRPVGTSIATLSANDEDTGENARITYVIQDPVPQFRIDPDSGTMYTMMELDYENQVAYTLTIMAQDNGIPQKSDTTTLEILILDANDNAPQFLWDFYQGSIFEDAPPSTSILQVSATDRDSGPNGRLLYTFQGGDDGDGDFYIEPTSGVIRTQRRLDRENVAVYNLWALAVDRGSPTPLSASVEIQVTILDINDNAPMFEKDELELFVEENNPVGSVVAKIRANDPDEGPNAQIMYQIVEGDMRHFFQLDLLNGDLRAMVELDFEVRREYVLVVQATSAPLVSRATVHILLVDQNDNPPVLPDFQILFNNYVTNKSNSFPTGVIGCIPAHDPDVSDSLNYTFVQGNELRLLLLDPATGELQLSRDLDNNRPLEALMEVSVSDGIHSVTAFCTLRVTIITDDMLTNSITVRLENMSQEKFLSPLLALFVEGVAAVLSTTKDDVFVFNVQNDTDVSSNILNVTFSALLPGGVRGQFFPSEDLQEQIYLNRTLLTTISTQRVLPFDDNICLREPCENYMKCVSVLRFDSSAPFLSSTTVLFRPIHPINGLRCRCPPGFTGDYCETEIDLCYSDPCGANGRCRSREGGYTCECFEDFTGEHCEVDARSGRCANGVCKNGGTCVNLLIGGFHCVCPPGEYERPYCEVTTRSFPPQSFVTFRGLRQRFHFTISLTFATQERNGLLLYNGRFNEKHDFIALEIVDEQVQLTFSAGETTTTVAPKVPSGVSDGRWHSVQVQYYNKPNIGHLGLPHGPSGEKMAVVTVDDCDTTMAVRFGKDIGNYSCAAQGTQTGSKKSLDLTGPLLLGGVPNLPEDFPVHNRQFVGCMRNLSVDGKNVDMAGFIANNGTREGCAARRNFCDGRRCQNGGTCVNRWNMYLCECPLRFGGKNCEQAMPHPQLFSGESVVSWSDLNIIISVPWYLGLMFRTRKEDSVLMEATSGGPTSFRLQILNNYLQFEVSHGPSDVESVMLSGLRVTDGEWHHLLIELKNVKEDSEMKHLVTMTLDYGMDQNKADIGGMLPGLTVRSVVVGGASEDKVSVRRGFRGCMQGVRMGGTPTNVATLNMNNALKVRVKDGCDVDDPCTSSPCPPNSRCHDAWEDYSCVCDKGYLGINCVDACHLNPCENMGACVRSPGSPQGYVCECGPSHYGPYCENKLDLPCPRGWWGNPVCGPCHCAVSKGFDPDCNKTNGQCQCKENYYKLLAQDTCLPCDCFPHGSHSRTCDMATGQCACKPGVIGRQCNRCDNPFAEVTTLGCEVIYNGCPKAFEAGIWWPQTKFGQPAAVPCPKGSVGNAVRHCSGEKGWLPPELFNCTTISFVDLRAMNEKLSRNETQVDGARALQLVRALRSATQHTGTLFGNDVRTAYQLLGHVLQHESWQQGFDLAATQDADFHEDVIHSGSALLAPATRAAWEQIQRSEGGTAQLLRRLEGYFSNVARNVRRTYLRPFVIVTANMILAVDIFDKFNFTGARVPRFDTIHEEFPRELESSVSFPADFFRPPEEKEGPLLRPAGRRTTPQTTRPGPGTEREAPISRRRRHPDDAGQFAVALVIIYRTLGQLLPERYDPDRRSLRLPHRPIINTPMVSTLVYSEGAPLPRPLERPVLVEFALLEVEERTKPVCVFWNHSLAVGGTGGWSARGCELLSRNRTHVACQCSHTASFAVLMDISRRENGEVLPLKIVTYAAVSLSLAALLVAFVLLSLVRMLRSNLHSIHKHLAVALFLSQLVFVIGINQTENPFLCTVVAILLHYIYMSTFAWTLVESLHVYRMLTEVRNIDTGPMRFYYVVGWGIPAIVTGLAVGLDPQGYGNPDFCWLSLQDTLIWSFAGPIGAVIIINTVTSVLSAKVSCQRKHHYYGKKGIVSLLRTAFLLLLLISATWLLGLLAVNRDALSFHYLFAIFSGLQGPFVLLFHCVLNQEVRKHLKGVLGGRKLHLEDSATTRATLLTRSLNCNTTFGDGPDMLRTDLGESTASLDSIVRDEGIQKLGVSSGLVRGSHGEPDASLMPRSCKDPPGHDSDSDSELSLDEQSSSYASSHSSDSEDDGVGAEEKWDPARGAVHSTPKGDAVANHVPAGWPDQSLAESDSEDPSGKPRLKVETKVSVELHREEQGSHRGEYPPDQESGGAARLASSQPPEQRKGILKNKVTYPPPLTLTEQTLKGRLREKLADCEQSPTSSRTSSLGSGGPDCAITVKSPGREPGRDHLNGVAMNVRTGSAQADGSDSEKP

SEQ ID NO: 64 - protein, 1324 aa, Homo sapiens
MFGDLFEEEYSTVSNNQYGKGKKLKTKALEPPAPREFTNLSGIRNQGGTCYLNSLLQTLHFTPEFREALFSLGPEELGLFEDKDKPDAKVRIIPLQLQRLFAQLLLLDQEAASTADLTDSFGWTSNEEMRQHDVQELNRILFSALETSLVGTSGHDLIYRLYHGTIVNQIVCKECKNVSERQEDFLDLTVAVKNVSGLEDALWNMYVEEEVFDCDNLYHCGTCDRLVKAAKSAKLRKLPPFLTVSLLRFNFDFVKCERYKETSCYTFPLRINLKPFCEQSELDDLEYIYDLFSVIIHKGGCYGGHYHVYIKDVDHLGNWQFQEEKSKPDVNLKDLQSEEEIDHPLMILKAILLEENNLIPVDQLGQKLLKKIGISWNKKYRKQHGPLRKFLQLHSQIFLLSSDESTVRLLKNSSLQAESDFQRNDQQIFKMLPPESPGLNNSISCPHWFDINDSKVQPIREKDIEQQFQGKESAYMLFYRKSQLQRPPEARANPRYGVPCHLLNEMDAANIELQTKRAECDSANNTFELHLHLGPQYHFFNGALHPVVSQTESVWDLTFDKRKTLGDLRQSIFQLLEFWEGDMVLSVAKLVPAGLHIYQSLGGDELTLCETEIADGEDIFVWNGVEVGGVHIQTGIDCEPLLLNVLHLDTSSDGEKCCQVIESPHVFPANAEVGTVLTALAIPAGVIFINSAGCPGGEGWTAIPKEDMRKTFREQGLRNGSSILIQDSHDDNSLLTKEEKWVTSMNEIDWLHVKNLCQLESEEKQVKISATVNTMVFDIRIKAIKELKLMKELADNSCLRPIDRNGKLLCPVPDSYTLKEAELKMGSSLGLCLGKAPSSSQLFLFFAMGSDVQPGTEMEIVVEETISVRDCLKLMLKKSGLQGDAWHLRKMDWCYEAGEPLCEEDATLKELLICSGDTLLLIEGQLPPLGFLKVPIWWYQLQGPSGHWESHQDQTNCTSSWGRVWRATSSQGASGNEPAQVSLLYLGDIEISEDATLAELKSQAMTLPPFLEFGVPSPAHLRAWTVERKRPGRLLRTDRQPLSPQDVLLRTQVRIPGERTYAPALDLVWNAAQGGTAGSLRQRVADFYRLPVEKIEIAKYFPEKFEWLPISSWNQQITKRKKKKKQDYLQGAPYYLKDGDTIGVKPFKVPLFGHSQWKLLELKGKNLLIDDDDDFSTIRDDTGKEKQKQRALGRRKSILAARVPGTACPLPLGASGEERSQVEVAGQLCSPQVLVPSETWDMGEGLQRWLLRGFSCLKKMHNVCVNRRYGGSGMPLLRCGRRLTFPDSSLAESSIPKTVSHVLSLLVTWASRFLVSPVTDGKQH

SEQ ID NO: 65 - protein, 1346 aa, Homo sapiens
MFGDLFEEEYSTVSNNQYGKGKKLKTKALEPPAPREFTNLSGIRNQGGTCYLNSLLQTLHFTPEFREALFSLGPEELGLFEDKDKPDAKVRIIPLQLQRLFAQLLLLDQEAASTADLTDSFGWTSNEEMRQHDVQELNRILFSALETSLVGTSGHDLIYRLYHGTIVNQIVCKECKNVSERQEDFLDLTVAVKNVSGLEDALWNMYVEEEVFDCDNLYHCGTCDRLVKAAKSAKLRKLPPFLTVSLLRFNFDFVKCERYKETSCYTFPLRINLKPFCEQSELDDLEYIYDLFSVIIHKGGCYGGHYHVYIKDVDHLGNWQFQEEKSKPDVNLKDLQSEEEIDHPLMILKAILLEENNLIPVDQLGQKLLKKIGISWNKKYRKQHGPLRKFLQLHSQIFLLSSDESTVRLLKNSSLQAESDFQRNDQQIFKMLPPESPGLNNSISCPHWFDINDSKVQPIREKDIEQQFQGKESAYMLFYRKSQLQRPPEARANPRYGVPCHLLNEMDAANIELQTKRAECDSANNTFELHLHLGPQYHFFNGALHPVVSQTESVWDLTFDKRKTLGDLRQSIFQLLEFWEGDMVLSVAKLVPAGLHIYQSLGGDELTLCETEIADGEDIFVWNGVEVGGVHIQTGIDCEPLLLNVLHLDTSSDGEKCCQVIESPHVFPANAEVGTVLTALAIPAGVIFINSAGCPGGEGWTAIPKEDMRKTFREQGLRNGSSILIQDSHDDNSLLTKEEKWVTSMNEIDWLHVKNLCQLESEEKQVKISATVNTMVFDIRIKAIKELKLMKELADNSCLRPIDRNGKLLCPVPDSYTLKEAELKMGSSLGLCLGKAPSSSQLFLFFAMGSDVQPGTEMEIVVEETISVRDCLKLMLKKSGLQGDAWHLRKMDWCYEAGEPLCEEDATLKELLICSGDTLLLIEGQLPPLGFLQVPIWWYQLQGPSGHWESHQDQTNCTSSWGRVWRATSSQGASGNEPAQVSLLYLGDIEISEDATLAELKSQAMTLPPFLEFGVPSPAHLRAWTVERKRPGRLLRTDRQPLREYKLGRRIEICLEPLQKGENLGPQDVLLRTQVRIPGERTYAPALDLVWNAAQGGTAGSLRQRVADFYRLPVEKIEIAKYFPEKFEWLPISSWNQQITKRKKKKKQDYLQGAPYYLKDGDTIGVKPFKVPLFGHSQWKLLELKGKNLLIDDDDDFSTIRDDTGKEKQKQRALGRRKSILAARVPGTACPLPLGASGEERSQVEVAGQLCSPQVLVPSETWDMGEGLQRWLLRGFSCLKKMHNVCVNRRYGGSGMPLLRCGRRLTFPDSSLAESSIPKTVSHVLSLLVTWASRFLVSPVTDGKQH

SEQ ID NO: 66 - protein, 99 aa, Homo sapiens [sequence omitted]

SEQ ID NO: 67 - protein, 458 aa, Homo sapiens
MTCQAWHEAEEGHGITHSCAVCILCGPSREGDSPVAMGMTRMLLECSLSDKLCVIQEKQYEVIIVPTLLVTIFLILLGVILWLFIREQRTQQQRSGPQGIAPVPPPRDLSWEAGHGGNVALPLKETSVENFLGATTPALAKLQVPREQLSEVLEQICSGSCGPIFRANMNTGDPSKPKSVILKALKEPAGLHEVQDFLGRIKFHQYLGKHKNLVQLEGCCTEKLPLYMVLEDVAQGDLLGFLWTCRRDVMTMDGLLYDLTEKQVYHIGKQVLLALEFLQEKHLFHGDVAARNILMQSDLTAKLCGLGLAYEVYTRGAISSTQTIPLKWLAPERLLLRPASIRADVWSFGILLYEMVTLGAPPYPEVPPTSILEHLQRRKIMKRPSSCTHTMYSIMKSCWRWREADRPSPRELRLRLEAAIKTADDEAVLQVPELVVPELYAAVAGIRVESLFYNYSML

SEQ ID NO: 68 - protein, 206 aa, Homo sapiens
MDSQQEDLRFPGMWVSLYFGILGLCSVITGGCIIFLHWRKNLRREEHAQQWVEVMRAATFTYSPLLYWINKRRRYGMNAAINTGPAPAVTKTETEVQNPDVLWDLDIPEGRSHADQDSNPKAEAPAPLQPALQLAPQQPQARSPFPLPIFQEVPFAPPLCNLPPLLNHSVSYPLATCPERNVLFHSLLNLAQEDHSFNAKPFPSEL

SEQ ID NO: 69 - protein, 281 aa, Homo sapiens
MAQSGLTATSASQVQAILLPQPASVRHYAWVVDQIDTLTSDLQLEDEMTDSSKTDTLNSSSSGTTASSLEKIKVQANAPLIKPPAHPSAILTVLRKPNPPPPPPRLTPVKCEDPKRVVPTANPVKTNGTLLRNGGLPGGPNKIPNGDICCIPNSNLDKAPVQLLMHRPEKDRCPQAGPRERVRFNEKVQYHGYCPDCDTRYNIKNREVHLHSEPVHPPGKIPHQGPPLPPTPHLPPFPLENGGMGISHSNSFPPIRPATVPPPTAPKPQKTILRKSTTTTV

SEQ ID NO: 70 - protein, 259 aa, Homo sapiens
MSPAVVPNLWSVDGEVTVAEQKPGEIAEELASSYERKLIEVAEMHGELIEFNERLHRALVAKEALVSQMRQELIDLRGPVPGDLSQTSEDQSLSDFEISNRALINVWIPSVFLRGKAANAFHVYQVYIRIKDDEWNIYRRYTEFRSLHHKLQNKYPQVRAYNFPPKKAIGNKDAKFVEERRKQLQNYLRSVMNKVIQMVPEFAASPKKETLIQLMPFFVDITPPGEPVNSRPKAASRFPKLSRGQPRETRNVEPQSGDL

SEQ ID NO: 71 - protein, 847 aa, Homo sapiens [sequence omitted]

SEQ ID NO: 72 - protein, 158 aa, Homo sapiens
MIAVILGSLFLIASVTWLLWSAFSPYAVWQRKDILFQICYGMYGFMDLVCIGLIVHEGAAVYRVFKRWRAVNLHWDVLNYDKATDIEESSRGESSTSRTLWLPLTALRNRNLVHPTQLTSPRFQCGYVLLHLFNRMRPHEDLSEDNSSGEVVMRVTSV

SEQ ID NO: 73 - protein, 215 aa, Homo sapiens
MPPRRIIVEVKVLDVQKRRVPNKHYVYIIRVTWSSGSTEAIYRRYSKFFDLQMQMLDKFPMEGGQKDPKQRIIPFLPGKILFRRSHIRDVAVKRLIPIDEYCKALIQLPPYISQCDEVLQFFETRPEDLNPPKEEHIGKKKSGGDQTSVDPMVLEQYVVVANYQKQESSEISLSVGQVVDIIEKTESGWWFVSTAEEQGWVPATVPRRARMRVQG

SEQ ID NO: 74 - protein, 201 aa, Homo sapiens
MASVAWAVLKVLLLLPTQTWSPVGAGNPPDCDAPLASALPRSSFSSSSELSSSHGPGFSRLNRRDGAGGWTPLVSNKYQWLQIDLGERMEVTAVATQGGYGSSDWVTSYLLMFSDGGRNWKQYRREESIWGFPGNTNADSVVHYRLQPPFEARFLRFLPLAWEPPGAGLGCGLKCTDVHINLRWFILMDKVLCCIHLIKNL

SEQ ID NO: 75 - protein, 81 aa, Homo sapiens
MLSPKIRQARRARSKSLVMGEQSRSPGRMPCPHRLGPVLKAGWLKKQRSIMKNWQQRWFVLRGDQLFYYKDKDEIKPQENK

SEQ ID NO: 76 - protein, 456 aa, Homo sapiens
METTVSRPVLSPTHINATASETFTVLQQRMRIVEEQTSSLRDDLIMLDFGEKRSHVNSIKERTSSVGLPSVIPNSTRRVSFAPNLPSMKTSQDIGDSRISLKTLLNAIKTMEGRLEGKIEILASRPLINDESPNFLKQDSVKSILERSKEELSRTVKCRNAALKESQKLKEDLEAVEDRENKKARNQSLLTVGNFQRQLAEAKEDNCKVTIMLENVLASHSKMQGALEKVQIELGRRDSEIAGLKKERDLNQQRVQKLEAEVDQWQARMLVMEDQHNSEIESLQKALGVAREDNRKLAMSLEQALQTNNHLQTKLDHIQEQLESKELERQNLETFKDRMTEESKVEAELHAERIEALRKQFQTERETTKKVAQREVAELKKALDEANFRSVEVSRTNRELRQKLAELEKILESNKEKIKNQKTQIKLHLSAKANNAQNIERMKVVWETSSHFLDTL

SEQ ID NO: 77 - protein, 1381 aa, Homo sapiens
MGIKPASFNKVTDPEVKEIIEGCIRQNKSERLSIRDLLNHAFFAEDTGLRVELAEEDDCSNSSLALRLWVEDPKKLKGKHKDNEAIEFSFNLETDTPEEVAYEMVKSGFFHESDSKAVAKSIRDRVTPIKKTREKKPAGCLEERRDSQCKSMGNVFPQPQNTTLPLAPAQQTGAECEETEVDQHVRQQLLQRKPQQHCSSVTGDNLSEAGAASVIHSDTSSQPSVAYSSNQTMGSQMVSNIPQAEVNVPGQIYSSQQLVGHYQQVSGLQKHSKLTQPQILPLVQGQSTVLPVHVLGPTVVSQPQVSPLTVQKVPQIKPVSQPVGAEQQAALLKPDLVRSLNQDVATTKENVSSPDNPSGNGKQDRIKQRRASCPRPEKGTKFQLTVLQVSTSGDNMVECQLETHNNKMVTFKFDVDGDAPEDIADYMVEDNFVLESEKEKFVEELRAIVGQAQEILHVHFATERATGVDSITVDSNSSQTGSSEQVQINSTSTQTSNESAPQSSPVGRWRFCINQTIRNRETQSPPSLQHSMSAVPGRHPLPSPKNTSNKEISRDTLLTIENNPCHRALFTSKSEHKDVVDGKISECASVETKQPAILYQVEDNRQIMAPVTNSSSYSTTSVRAVPAECEGLTKQASIFIPVYPCHQTASQADALMSHPGESTQTSGNSLTTLAFDQKPQTLSVQQPAMDAEFISQEGETTVNTEASSPKTVIPTQTPGLEPTTLQPTTVLESDGERPPKLEFADNRIKTLDEKLRNLLYQEHSISSIYPESQKDTQSIDSPFSSSAEDTLSCPVTEVIAISHCGIKDSPVQSPNFQQTGSKLLSNVAASQPANISVFKRDLNVITSVSSELCLHEMSSDASLPGDPEAYPAAVSSGGAIHLQTGVETEEMRSAIAPDPIPLTRESTADTRALNRCKAMSGSFQRGRFQVITIPQQQSAKMTSFGIEHISVFSETNHSSEEAFIKTAKSQLVEIEPATQNPKTSFSYEKLQALQETCKENKGVPKQGDNFLSFSAACETDVSSVTPEKEFEETSATGSSMQSGSELLLKEREILTAGKQPSSDSEFSASLAGSGKSVAKTGPESNQCLPHHEEQAYAQTQSSLFYSPSSPMSSDDESEIEDEDLKVELQRLREKHIQEVVNLQTQQNKELQELYERLRSIKDSKTQSTEIPLPPASPRRPRSFKSKLRSRPQSLTHVDNGIVATDPLCVESNAASCQQSPASKKGMFTDDLHKLVDDWTKEAVGNSLIKPSLNQLKQSQHKLETENWNKVSENTPSTMGYTSTWISSLSQIRGAVPTSLPQGLSLPSFPGPLSSYGMPHVCQYNAVAGAGYPVQWVGISGTTQQSVVIPAQSGGPFQPGMNMQAFPTSSVQNPATIPPGPK

SEQ ID NO: 78 - protein, 220 aa, Homo sapiens [sequence omitted]

SEQ ID NO: 79 - protein, 743 aa, Homo sapiens
MAVASILQSLQPLPAGMSPFFLTAKEVSYLYVNTADLHSGPSFVESLFEEFDCDLSDLRDMPEDDGEPSKGASPELAKSPRLRNAADLPPPLPNKPPPEDYYEEALPLGPGKSPEYISSHNGCSPSHSIVDGYYEDADSSYPATRVNGELKSSYNDSDAMSSSYESYDEEEEEGKSPQPRHQWPSEEASMHLVRECRICAFLLRKKRFGQWAKQLTVIREDQLLCYKSSKDRQPHLRLALDTCSIIYVPKDSRHKRHELRFTQGATEVLVLALQSREQAEEWLKVIREVSKPVGGAEGVEVPRSPVLLCKLDLDKRLSQEKQTSDSDSVGVGDNCSTLGRRETCDHGKGKKSSLAELKGSMSRAAGRKITRIIGFSKKKTLADDLQTSSTEEEVPCCGYLNVLVNQGWKERWCRLKCNTLYFHKDHMDLRTHVNAIALQGCEVAPGFGPRHPFAFRILRNRQEVAILEASCSEDMGRWLGLLLVEMGSRVTPEALHYDYVDVETLTSIVSAGRNSFLYARSCQNQWPEPRVYDDVPYEKMQDEEPERPTGAQVKRHASSCSEKSHRVDPQVKVKRHASSANQYKYGKNRAEEDARRYLVEKEKLEKEKETIRTELIALRQEKRELKEAIRSSPGAKLKALEEAVATLEAQCRAKEERRIDLELKLVAVKERLQQSLAGGPALGLSVSSKPKSGETANKPQNSVPEQPLPVNCVSELRKRSPSIVASNQGRVLQKAKEWEMKKT

SEQ ID NO: 80 - protein, 239 aa, Homo sapiens
MPPSPFESSSRATPVTCNLCPEIITMARVASAQGLCDITKGLAPGAQSSSCEGKQTRHEQLPSPSLLTMWTLKSSLVLLLCLTCSYAFMFSSLRQKTSEPQGKVQYGEHFRIRQNLPEHTQGWLGSKWLWLLFVVVPFVILQCQRDSEKNKEQSPPGLRGGQLHSPLKKKRNASPNKDCAFNTLMELEVELMKFVSKVRNLKRAMATGSGSNLRLRKSEMPADPYHVTICEIWGEESSS

SEQ ID NO: 81 - protein, 244 aa, Homo sapiens
MALVTLQRSPTPSAASSSASNSELEAGSEEDRKLNLSLSESFFMVKGAALFLQQGSSPQGQRSLQHPHKHAGDLPQHLQVMINLLRCEDRIKLAVRLESAWADRVRYMVVVYSSGRQDTEENILLGVDFSSKESKSCTIGMVLRLWSDTKIHLDGDGGFSVSTAGRMHIFKPVSVQAMWSALQVLHKACEVARRHNYFPGGVALIWATYYESCISSEQSCINEWNAMQDLESTRPDSPALFVDK

SEQ ID NO: 82 - protein, 254 aa, Homo sapiens
MQSNMTNTVVRTTLRNDLSQEGIIHHLKILSPIYCAFQNDLLTSSGFTLEWGVYTIIEDLHGAGNFVTEMQLFIGDSPIPQNYSVSASDDVRIEVGLYRQKSNLKVVLTECWATPSSNARDPITFSFINNSCPVPNTYTNVIENGNSNKAQFKLRIFSFINDSIVYLHCKLRVCMESPGATCKIISHLCLSPPRGEPPHAEAGLGAGYVVLIVVAIFVLVAGTATLLIVRYQRMNGRYNFKIQSNNFSYQVFYE

SEQ ID NO: 83 - protein, 274 aa, Homo sapiens
MKLPKGTRSSVYFAQHPEKEPLPSRQEVKQTPVIMAKIKGPGPAKYLRPSCTGYIDHDISMFKAPAYTLHSRHSEKRMVCHSSPGPCYLLDPKITRFGMSSCPQVPMEERISNLRLNPTLASCQYYFEKIHPPGERRAPQYTFGYRRPYRVMDLNPAPNQYQMPLLLGPNTPVSRAAPCYSLASRDKNWFYKEDVAGGPGPTTYARPEPSIYQNRSPTYSMAKRFAYPLDLTPRPGPGSHEVQQVTVHKPHIPAFTMGIKHSLHLCPLVIDIRD

SEQ ID NO: 84 - protein, 346 aa, Homo sapiens [sequence omitted]

SEQ ID NO: 85 - protein, 715 aa, Homo sapiens [sequence omitted]

SEQ ID NO: 86 - protein, 699 aa, Homo sapiens
MERTAGKELALVRGQGIPGPRIPGDPQAPLQDWGEETEDGAVYSVSLRRQRSQRRSPAEGPGGSQAPSPIANTFLHYRTSKVRVLRAARLERLVGELVFGDREQDPSFMPAFLATYRTFVPTACLLGFLLPPMPPPPPPGVEIKKTAVQDLSFNKNLRAVVSVLGSWLQDHPQDFRDPPAHSDLGSVRTFLGWAAPGSAEAQKAEKLLEDFLEEAEREQEEEPPQVWTDSSEACAEEEEGLMPQGPQLLDFSVDEVAEQLTLIDLELFSKVRLYECLGSVWSQRDRPGAAGASPTVRATVAQFNTVTGCVLGSVLGAPGLAAPQRAQRLEKWIRIAQRCRELRNFSSLRAILSALQSNPIYRLKRSWGAVSREPLSTFRKLSQIFSDENNHLSSREILFQEEATEGSQEEDNTPGSLPSKPPPGPVPYLGTFLTDLVMLDTALPDMLEGDLINFEKRRKEWEILARIQQLQRRCQSYTLSPHPPILAALHAQNQLTEEQSYRLSRVIEPPAASCPSSPRIRRRISLTKRLSAKLAREKSSSPSGSPGDPSSPTSSVSPGSPPSSPRSRDAPAGSPPASPGPQGPSTKLPLSLDLPSPRPFALPLGSPRIPLPAQQSSEARVIRVSIDNDHGNLYRSILLTSQDKAPSVVRRALQKHNVPQPWACDYQLFQVLPGDRVAPRDFMLRRKEGTRNTLSVSPS

SEQ ID NO: 87 - DNA, 1344 bp, Homo sapiens
atgggggtacagccattgggtaaatacagctgttccaaatgggagaaattggccaaaacaaaggggctacaggctccatgcaagtctgaaatccagtggacaatcaaatcgaaaagctccaaaatcatctcctttgacttcatgtctcacatccaggtcaagctcatgcaaaacataggttcccataatcttgggcaggtctgcccctgtgactttgcagggtactgcaacagccacttgcaggtacttggctttatcccgaaaaaagagaggaagaaaaagaatgatcctatagatgaggtgaaggtcaggcaccagatggataccatggcctttagcctgacagtgcccacgttggccttgaagatgcccaacggactggatggaatgtccctctctccacctggggcaagggtccctctccactacctggaaaccgaattggaagacccatttgctttcaatgaggaagatgatgacctaaagaaaggggcaactgtgagaaagaagttgcagagcaagttggcccagaatcggcagcgccagagagagacagagattttaaaagttcgacaagagcactttagtccccctcctgcaccttcacagcagcagcctccgcagcagcactcccacctgtcacctttatctacttctttaaaacctccagcgccaccgcagggttcagtctgcaagtcacctcaacctcagaacaccagcctaccaatgcagggagtggcacccaccacacacactatagcacaagcacggcagttgtctcacaagaggcctctgcccctcctgccatccagtagggctcccactgtggacccacccaggactgaccggatcctcatgaaagccacagccttctctccacacttctcatgtataagccgactgcagagactggtgaaactgtgcacccagaaacatcagttggacactgatctgtttccccatttaggtttggactggtctgaagagagcggagaggaaccagaggactcagagcaggcctcgccctaccaggttgcatggtccatccgggaaaccctcagatatcaaagacatgcgtcagatgatgatgatgcggagagtaggagctccagggtgactcaactttgcacttactttcagcagaaatataagcacctctgccgcctggagcgggcagaatctcgtcaaaagaaatgccggcatacgtttaggaaagctttgctgcaggcggccagtaaagaaccagaatgcactggtcagttaatacaagaactgcggagagctgcatgcagtcgaaccagggctgatgaggaagtcaatgtgctgctctgcgacaacctttaa

SEQ ID NO: 88 - DNA, 906 bp, Homo sapiens
atgggaggtgtggaaagccacatttaccagctccctcagtgcctgattggaagaggggataaggttataattgtcatccatgcttatggaaatcgaaaaggcatccgttacctcactaatgacctcaaagtctattacttgcctctgaaagtcatgtataaccagtctatggccatgaccctctttcacagtctgccattgctcaagtacatatttgttcaggagagagtcacaataatccattcacatagttcattttctgccatggcccatgatgttctcttccatgccaagacaatggggcttcaaacagtcttaacagaccatcccctttctggatttgctaaggtccattcagtgcttacaaacaaacttctaactgtgtctctttgtgacacaagccgtatcatttgcgtttcttatactagtaaggaaaataccgtactacgagcggcactgattactgaaatagtgtctgtcattcctaacgctgtagatcctattgacttcactccagacccatttagaaggcatgatagtataactattgttgtcagcagacttgtttacagaaagggaacaaatttggttagtgggactgatatcactgttgatagtgcagagaaaccctccataattaagttttctgtaaaagccttcgtgttttctgagcagaatgtacgaggtgtgccatcccaaaaccagctgctaccctgtccttttaatgtatggtttggagaagatctgcctctaagtcctcggagtcctctgactcccagacacggaccaggattggctaatgtttgtcagtacgatgagtggatagctgtgaggcatgaagccactttgttgcccatgcaagaagatctgtcaatctggttatctggtttattaggtgaggcttga

SEQ ID NO: 89 - DNA, 1353 bp, Homo sapiens
  misc_feature (1)...(1353): n = a,t,c or g
atggaagccccggagggcggcggaggggggcctgcagcgcggggccccgaggggcaaccggcgcccgaagccagggtgcacttccgagtggcgaggttcatcatggaggcaggtgtcaagctagggatgaggtccattcccattgccactgcttgcaccatttaccataagttcttttgcaataccaacctggacgcttatgacccttacctgattgccgtgtcttccatttacttggccggcaaagcggaaaagcagcacctgcggactcatgacatcatcaatgtgtccaacaggtactttaacccgagcggtgagcccctggaattggaatcccgcttctgggagctccgggacagcattgtgcagtgtgagcttctcatgctgagagttctgcgcttccaggtctccttccagcttccacacaagtacctgctccactacctggtttccctcgaaaactctctgaaccgccacagctggcagcggaccccggttgccgtcactgcctgggccctgttgcgggacagctaccacgggggtctgtgcctccgtttccaggcccagcacatcgcggtggcggtgctctacctggccctgcaggtctacggagttgaggtgcccgccgaggttaaggctgagaagccgttgggtggcaggtgtttaatgacgaccttaccaagccaatcattgataatattgtgtctgatctcattcagatttataccatggacacagagatcccctaaggtcctggcccaggcctgcccaaagagaagcccaggatggtcggctgcctggggacattgtcaacacgtcggcatgacgggctggtccccacaggacccagncgggaggactggttgtgctgctggagaagggctggagaaggcaatggcatcgtgccgctttgccagtccctagaagtcgcggtgcaggtgatggtgggagccgcgcctccagcgggcaggccgggagtgtactaccatggggcgctgtgcctccgcttccaggcccagcacatcgccgtggcggtgctctacctggccctgcaggtctacggagttgaggtgcccgccgaggtcgaggctgagaagccgtggtggcagatttataccatggacacagagatcccctaaggtcctggcccaggcctgcccaaagagaagccacatctgcgtttgtcctttgagaggactttgactacaatacaggcatgacatcaatgaaaggaaagtcatgaaatcgatgagactgaatccctacggatttcttaaaagccagatttgtagggagaatgaatgtgcaacgtggctgaaatctattttgtgtaataaaaggtgatacaagtca

SEQ ID NO: 90 - DNA, 1869 bp, Homo sapiens
gtattacgaccgtggcgccgagtaggccagcgtcttctgactgcgagtcggacggatcataagagcaggacgcaggtcccggatccagaatgggaccggagaaatgagcgggacccagaccgacgagacgagtggggcggtggtcccagacacatagtcagacggacgacacgagtggggcagtggtccctgagtacccatctgaccgatgatacgcggggggccgtggtcccggtcaggtggcccaacagtccacccctgaaaaaggcggtcataaaacccccaggagacgaagatgatggcacgtcgggaccccaaatcttgggccaagagactgagtcctgtgtagccacgtttggctgcgttgttgacatcggcttcaccatcgtgccccttggaaccccgagtccttcctttcagagttcctccgtcacacgggctttgcgagggaacatcgtacccgaactctcccggcacttaacggcccccatgccgctcaagtgcaaaaactgcggggcctttggccacacggccagaagtaccaggtgccccatgaagtgctggaaggcagccctggttccagcgaccttggggaaaaaggaagggaaggaaaacctgaaaccatggaagccccgggttgaagccaacccggggcccttgaacaaggataagggagagaaggaagagagaccaaggcaacaagacccgcagaggaaggctctcctccacatgttttccgggaaacctccagagaagccgctgccgaatggaaaaggatccacggagtcttctgatcatctgagggtcaccctggttgatttcctttcagcttcccgtctgcgggaggaaatcggggaacccctctttcttgccttcttggggtcagggactccacgatccttccaggttgcaagcgggccaatgccggtccacacaaccagtaagaggccgcgcgtggaccctgtcctcgctgatcgctcagctgccgaaatgtctggcaggggctccgtcttggcttcactgtctcccctcagaaaagccagcctgagctcctcctcaagtcttggaccaaaggaaagacagacaggggctgcggccgacatccctcagcctgcagtcaggcaccagggccgcgagcctctcctcgtggtgaagccgacacacagccgccccgagggtgactgccgagaagttccccaggctgcctccaaaacccacggcctgctccaggccgccagaccccaggcacaagacaaacgtcctgcggtgacctcgcagccctgcccgccagccgccacacacagcttgggcctaggctccaatctcagcttcgggccaggagccaagagacctgcccaggctccgattcaggcttgcctgaacttccccaagaaaccgagactgggtcccttccagatccccgaaagcgccatccagggaggtgagctgggggccccggaaaatctccaacctccgccagccgcaaccgaacttggaccaagtacgtcgccccagatgggcaggaggacaccggcccaggtgcccagcgtcgaccggcagcctccgcacagcagaccttgcctgcctactgcccaggcctgcaccatgtcccatcactcagcggccagccatgatggggcccagcctctcagagtgctcttccggagactggaaaacggacgctggagctccagcctcctggcggccccctcatttcactctcctgagaagccgggagccttcctcgctcagagccctcatgtgtcagagaagtctgaggctccctgtgttcgtgtcccaccgagcgtcctctatgaggaccttcaggtttcctcctcctcagaggacagcgattctgacctggagtga

SEQ ID NO: 91 - DNA, 434 bp, Homo sapiens
tatctaaagtaggtatgtacagaaagagttgaatagcaaaagtgtaaatcatgtaatcattgtgagatttttgggtttgtcacaactgagaaatattgctgatggtggatggtcctcaagtgtgaaaatgttccttgtgaattgcttgtatccaaaatatacacacagcattaagggctggtttttattttttattttttccaatcctcttttcttctcaaggtgtccaagtcacacagaaccacagaatctcacaggtgtctcagaattccttctcctgggactctcagaggatccagaactgcagcctgtcctcgcttggctgtccttgtccatttacctggtcacagtgctggggaacctgctcatcatcctggctgtcagctctgactcccacctccacacccccatatacttcttccagttctcgtgcc

SEQ ID NO: 92 - DNA, 3384 bp, Homo sapiens
atggaggtgattcctgaagggtacaggctttccgagttgaaaaaatgttctaaatggattgtggtgatggttgcacggctctatgaatatactaaaaaccaacaaattatacatttaaaatgggtgaatcatatgctgggatgcctactggaccgcaacgacccgctccgggatgtcgatgaggcagccgtgcctgtgctgtgtatctgcagtgctgacgaccccgtgtgtggacccccagaccacactctgacaactgaactcttccacagcaacccctacttcttcctcctgctcagtcgccacggaggccactgtggcttcctgcgccaggagcccttgccagcctggagccatgaggtcatcttggagtccttccgggccttgactgagttcttccgaacggaggagaggattaaagggctgagcaggcacagagcttccttccttgggggccgtcgtcgtgggggagccttgcagaggcgggaagtctcttcctcttccaacctggaggagatctttaactggaagcgatcatacacaaggttgatggcagcggcagctggggctgcagcggcgccgggctctagagagccgcaggatcggccagagtgcggagctggacacccgggtcccagatactacagacacccggagaggtggctccttcgccctgaagccttcctcggccccctacgcactcgggccccttccgcagaggattcgcagcgtgagcgccccgcagcccgctcaggaccagagatgcgagttcggtatcctgtggtggctgcagtcttggccccatacctggctttaagccaagatccaatggtcaagtcttctgcttctggacagggtgcctctgggagctacaaccacgtccgtgaagagatgctcatcaaggctggcggtgctatgagcagacgtgtggttcggcaaagcaagttccgccatgtgtttgggcaggcagcaaaggccgaccaggcctacgaggacatccgtgtgtccaaggtcacatgggacagctccttctgtgccgtcaaccccaaattcctggccattattgtggaggctggaggcggggtgccttcatcgtcctgcctctggccaaggtggtggctagcaggctaccgttgtgttccagcacacactgtggatgacgtctgggtgcatatcatccaggctcagcagcacctccccggtgcccacattccagatgatgatcacattgtcaccacctgcccagagtggccaggcatggtagcagggaatccaatggccccagacttctctttgaactcatttgctccacccttcgccaatggccttccccggaacgttctccaggatcctccagagagccccaaagctttctccctcccttcactcaggctgctgctcaaatgtcacctccttagaaaagcccaccctgacagcccatctgaggaggtgaggggcgcctctgcccggccaccaccccgtctgggaggtgtacccaacagctcattgagaacgggccatgatgacaataggcggttttgtggaatagaaaggggggaaaggaggagcgactcaagcttcgcgaaagaaaataaccaaaaagcatacaaagaaacgtacggcgtctctcatattacacgccatgatatgctgcagatccctaaacagcagcaaaacgaaaaataccaagtgcctcaattcgatcaatcaacgattaaaaatattgagtctgcaaaaggacttgatgtgtgggacagctggccgctgcaaaacgctgacggaacagtagctgaatacaacggctatcacgttgtgtttgctcttgcgggaagcccgaaagacgctgatgacacatcaatctacatgtttatcaaaagtcgcgacaactcaatcgacaatgatgaactcaaccctggctgggcatccatcagcaggggtgtgctggtgtgtgacgagtgctgcagcgtgcaccggagcctgggacgccacatctccattgtcaagcaccttcgccacagcgcctggcctcccacgctgctgcaggctttgcagaactttcagcggtataccggcatacagcatgtgcatcgcataggaatggcggaacgtatgtggtgtgaccggaacagagaacgtcacaccgtcagcagcagcggcgcaaccgcctccccaatccagaccgttcagctggatattacggcctttttaaagaccgtaaagaaaaataagcacaagttttatccggcctttattcacattcttgcccgcctgatgaatgctcatccggagttccgtatggcaatgaaagacgggtttattgagaatatgtttttcgtctcagccaatccctgggtgagtttcaccagttttgatttaaacgtggccaatatggacaacttcttcgcccccgttttcaccatgggcaaatattatacgcaaggcgacaaggtgctgatgccgctggcgattcaggaatatggctggaatctggaccgagcctatgactatgtgaaagaaagacgaacggtaaccaagcccaacccaagcttcatgagacaactggaagagtatcaggggatcttgctggcaagcgttatcaatcacaagaaacgtaaaaatagcccgcgaatcgtccagtcaaacgacctcactgaggcggcatatagtctctcccgggatcaaaaacgtatgctgtatctgttcgttgaccagatcagaaaatctgatggcaccctacaggaacatgacggtatctgcgagatccatgttgctaaatatgctgaaatattcggattgacctctgcggaagccagtaaggatatacggcaggcattgaagagtttcgcggggaaggaagtggttttttatcgccctgaagaggatgccggcgatgaaaaaggctatgaatcttttccttggtttatcaaacgtgcgcacagtccatccagagggctttacagtgtacatatcaacccatatctcattcccttctttatcgggttacagaaccggtttacgcagtttcggcttagtgaaacaaaagaaatcaccaatccgtatgccatgcgtttatacgaatccctgtgtcagtatcgtaagccggatggctcaggcatcgtctctctgaaaatcgactggatcatagagcgttaccagctgcctcaaagttaccagcgtatgcctgacttccgccgccgcttcctgcagcacatatttgttcttcgggagcgccctgaaaccgtgttaatagatctcattcagaggacaaaggatgcagtaagagagctggacaatctgcagtatcgaaagatgaagaaactccttttccaggaggcacataatggaccagcagtagaagcacaggaagaagaagaggatgattga

SEQ ID NO: 93 - DNA, 246 bp, Homo sapiens
cccttgccaaaacggtgaggcagccgtgtgttacctgccgacagcatgatgctaggcaaggtccagccgttccgcccggcatacgagcttacggagaagccccctttgaagatctccaggtagacttcacagagatgccaaagtgtggagatattaggaaaaatgtcactggggatgtgaatagccctgcggtattgagagtagtatcatcctctccccccttgcatattgggaacaacatcacag

SEQ ID NO: 94 - DNA, 640 bp, Homo sapiens
  misc_feature (1)...(640): n = a,t,c or g
ctgggataggggctgtggcagtacgcggggacccggctgcggtggctgcgggactgacgaatggagaggagaaaacctatggtggctgtgaaggacctgatgccatgtatgtcaaattgatatcatctgatggccatgaatttattgtaaaaagagaacatgcattaacatcaggcacgataaaagccatgttgagtggcccaggtcagtttgctgagaacgaaaccaatgaggtcaattttagagagataccttcacatgtgctatcgaaagtatgcatgtattttacatacaaggttcgctacactaacagctccaccgagattcctgaattcccaattgcacctgaaattgcactggaactgctgatggctgcgaacttcttagattgttaaataaaataaattataataaactgttaactcttttcagtatttaatacctgtagttcagttagtaactttttcatatatagcatgttgcctgtatgcagttgaactatataaagttcattgcaaagcagaatatcnttngtttttttgcattagnaatccaaagtttgaaaatttgtttgcttncatcaaacaaattaagggacattttnacaaactgagaaataaaaccaaatatgcctaaaaaa

SEQ ID NO: 95 - DNA, 499 bp, Homo sapiens
  misc_feature (1)...(499): n = a,t,c or g
agcgcgnnnnnnttttgaacgcttgcacgaattcggcacgaggcggcccaggagaagcagttcctgccggcgctgctgagtttcttcatctacaacccgcgcttctggccgcgggaaggagaggttgttcggaatcctataattgaaaaacagtaaagatggaaaaccagttattgaatatcaagaggaggagttgttgaagtctcaggggatccagaactgcagccagtccttgctgggctgttcctgtccatgtgcctggtcacggtgctggggaacctgctcatcatcctggccatcagccctgactcccacctccacacccccatgtacttcttcctctccaacctgtccttgcctgacatcggtttcacctccaccacggtccccaagatgattgtggacatccagtctcacagcagagtcatctcctatgcaggctgcctgactcagatgtctctctttgccatttttggaggcatggaagagagacatgctc

SEQ ID NO: 96 - DNA, 1349 bp, Homo sapiens
atgaaccgcaccggggcatgtcgacttcaaggggctggtgggccgtccctgtccttggagactcctctctgcctcaattgctctgtcctccctggagacctgtacccagggggtgcaaggaaccccatggcttgcaatggcagtgcggccagggggcactttgaccctgaggacttgaacctgactgacgaggcactgagactcaagtacctggggccccagcagacagagctgttcatgcccatctgtgccacatacctgctgatcttcgtggtgggcgctgtgggcaatgggctgacctgtctggtcatcctgcgccacaaggccatgcgcacgcctaccaactactacctcttcagcctggccgtgtcggacctgctggtgctgctggtgggcctgcccctggagctctatgagatgtggcacaactaccccttcctgctgggcgttggtggctgctatttccgcacgctactgtttgagatggtctgcctggcctcagtgctcaacgtcactgccctgagcgtggaacgctatgtggccgtggtgcacccactccaggccaggtccatggtgacgcgggcccatgtgcgccgagtgcttggggccgtctggggtcttgccatgctctgctccctgcccaacaccagcctgcacggcatccggcagctgcacgtgccctgccggggcccagtgccagactcagctgtttgcatgctggtcccgccacgggccctctacaacatggtagtgcagaccaccgcgctgctcttcttctgcctgcccatggccatcatgagcgtgctctacctgctcattgggctgcgactgcggcgggagaggctgctgctcatgcaggaggccaagggcaggggctctgcagcagccaggtccagatacacctgcaggctccagcagcacgatcggggccggagacaagtgaccaagatgctgtttgtcctggtcgtggtgtttggcatctgctgggccccgttccacgccgaccgcgtcatgtggagcgtcgtgtcacagtggacagatggcctgcacctggccttccagcacgtgcacgtcatctccggcatcttcttctacctgggctcggcggccaaccccgtgctctatagcctcatgtccagccgcttccgagagaccttccaggaggccctgtgcctcggggcctgctgccatcgcctcagaccccgccacagctcccacagcctcagcaggatgaccacaggcagcaccctgtgtgatgtgggctccctgggcagctgggtccaccccctggctgggaacgatggcccagaggcgcagcaagagaccgatccatcctgagtggagcctta

SEQ ID NO: 97 - DNA, 1545 bp, Homo sapiens
gcgctgcacgaattcggcacgagcggctgcttcaagtccttggctctgatccaggccacagattccaggattctacaggcaggaaacatcttagaaatcagggttgggcaggcaggagccaggagagtagctacaatgacttcaccagtactggtggacatacgagaagaggtgacctgccctatctgcctggagctcctaacagaacccctgagcatagactgtggccacagcttctgccaagcctgcatcacaccaaatggcagggaatcagtgattggtcaagaaggggaaagaagctgccctgtgtgccagaccagctaccagccagggaacctgcggcctaatcggcatctggccaacatagtgaggcggctcaaagaggtagtgttgggccctgggaagcagctgaaagcagttctttgtgcagaccatggagaaaaactgcagctcttctgtcaggaggatgggaaggagaagtttcaggagtctctaaagaagctgaagaacgaggagcaggaagctgagaagctaacagcttttatcagagagaagaagacatcctggaaggcaagggagactttttctgaagatgtcctggggcaggaatcatggcagagtacaaatgcaagggaaaatgcagggatcccagggctggaggctgcccacttctggattgccatccctttctgtgccatgtatcttgtagcactggttggaaatgctgccctcatcctggtcattgccatggacaatgctcttcatgcacctatgtacctcttcctctgccttctctcactcacagacctggctctcagttctaccactgtgcccaagatgctggccattttgtggctccatgctggtgagatttcctttggtggatgcctggcccagatgttttgtgtccattctatctatgctctggagtcctcgattctacttgccatggcctttgataggtatgtggctatctgtaacccattaaggtatacaaccattctcaaccatgctgtcataggcagaattggctttgttgggctattccgtagtgtggctattgtctcccccttcatcttcttgctgaggcgactcccctactgtggtcaccgtgtcatgacacacacatactgtgagcatatgggcatcgcccgactggcctgtgccaacatcactgtcaatattgtctatgggctaactgtggctctgctggccatgggactggattccattctcattgccatttcctatggctttatcctccatgcagtctttcaccttccatctcatgatgcccagcacaaagctctgagtacctgtggctcccacattggcatcatcctggttttctacatccctgccttcttctccttcctcacccaccgctttggtcaccacgaagtccccaagcatgtgcacatctttctggctaatctctatgtgctggtgcctcctgtactcaatcctattctctatggagctagaaccaaggagattcggagtcgacttctaaaactgcttcacctggggaagacttcaatatga

SEQ ID NO: 98 - DNA, 180 bp, Homo sapiens
gattcggcacggggggggatcctggagccatggggcgcgcgccgacgccatccgtggatgcgctgggtgaacctgaccgccgaggagctcaagaagttcaaggtgaagctgctgtcggtgccgctgcgcgagggctgtccatggacgccttggacctcaccgacaagctggtcagcttct

SEQ ID NO: 99 - DNA, 1923 bp, Homo sapiens
atgacgacctccgcactccggcgccaggtgaagaacatcgtgcacaactactccgaggcagaaatcaaggtgcgcgaggccaccagcaatgacccctggggcccccctagttcgctcatgtccgagatcgctgacctgaccttcaacacagtggccttcaccgaagtcatgggcatgctgtggcggcggctcaatgacagcggcaagaactggcggcacgtgtacaaggctctaacattgctggactacctgctcaagacgggctccgagcgggtggcccaccagtgccgcgagaacctctacaccatccagacactcaaggacttccagtacatcgaccgcgacggcaaggaccagggcgtcaacgtgcgcgagaaggtcaagcaggtgatggccctgctcaaggatgaggagcggctgcggcaggagcgaacccacgccctcaagaccaaggagcgcatggcactggagggcatcggcattggcagtgggcagctgggcttcagccgccgctacggcgaggactacagccgctcccggggctccccgtcctcctacaactgtgaagacatgatggtcattgcagcctcctcttcgtcaccccgctatacctccgacctggagcaggcccggcctcagacgtcaggggaagaggaactgcagctgcagctggccctcgccatgagccgtgaggaggcagagaagcctgtccccccagcctcccacagggacgaggacctgcagctgcagctggctctgcgcctgagccggcaggagcacgagaaggaggtgaggtcctggcagggtgatggctcccccatggccaatggtgcaggggccgtggtccaccatcagcgggacagagagcctgagagagaagagagaaaggaggaggagaagctaaaaaccagccagtcctccatcctggacttggctgacatcttcgtacctgccctggccccgccctccacacactgctctgctgacccatgggacatcccaggttttaggccgaacacagaggccagtggatcctcctgggggccttctgcagacccctggtctccgatcccctcaggaaccgtcctgtcccgaagccagccctgggatctgactcccatgctctcctcctctgagccctggggcaggaccccagtgctgcctgctgggccccccaccacagacccctgggccctgaactctccccaccacaaactccccagcactggggctgacccttggggagcctccctggagacctccgacacacctggtggtgcctcgacctttgacccatttgccaaacctccagaatccacagagaccaaggaggggctggagcaggccctgccctctgggaagcccagcagccctgtggagctggacctgtttggagaccccagccccagttccaagcaaaatggcacgaaggagccagatgccctggacctgggcatactaggggaagcactaacccagccaagcaaagaggcccgagcttgccggactcccgagtccttcctgggtccctcagcttcctccttggtcaaccttgactcgttggtcaaggcaccccaggttgcaaagacccggaaccccttcctgacaggtctcagcgctccgtcccccaccaacccgttcggcgcgggcgagccgggcaggccgacgctaaaccagatgcgcaccggctcgccggcgctgggcctggcaggcgggcctgtgggggcgcccctgggctccatgacctacagcgcctctctgcccctcccgctcagcagcgtgccagctggcttgaccctccccgcctcggttagcgtcttcccgcaggccggagccttcgcaccgcagccgctgctgcccacgccgagctcagccgggccgcggcccccgcccccgcagaccggcaccaaccccttcctctga

SEQ ID NO: 100 - DNA, 645 bp, Homo sapiens
ttatgccgctggcgatccaggttcatcaagccgttttgtgatgccttccatgtcggcaagaatgcttaatgaataccaacagtactgcgatgagtggcagggcgggggcgttatttttttaaaggcagttaatggtgcccttaaacgcctggttgctacgcctgaataagtgataataagcggatgaatggcagaaattcgatgataagttttgccgtagcctatgggcgccagcccaaatggccccgcgcatggattgaaggggtgtaaaggagttgtgggtgccgtgccccctatgggattccgatccagcggaaaattcggcaaagtaaccaccagggattcgcaagaaccggcatggttccggaagggggccacagaattttctgatcgggcaacgaacagatcaagcaacggtttttgatcccgggagagactatatcccgcctcagtgaggtcgtttgactggacgattcgcgggctatttttacgtttcttgtgattgataaccgctgtttccgccatgacagatccatgtgaagtgtgacaagtttttagattgtcacacgcatggcccaagattccattccttggaatccatgaggccacgaaccccagatcagagaacacgaggcttgccaccat

SEQ ID NO: 101 - DNA, 652 bp, Homo sapiens
gcggccgccgcgtgtactacgatgaaggggtggccagcagcgacgatgactccagcggagacgagtccgacgatgggacctccggatgcctccgctggtttcagcatcggcgaaatcgccgccgccgaaagccccagcgcaacttactccgcaactttctcgtgcaagccttcgggggctgcttcggtcgatctgagagtccccagcccaaagcctcgcgctctctcaaggtcaagaaggtacccctggcggagaagcgcagacagatgcgcaaagaagccctggagaagcgggcccagaagcgcgcagagaagaaacgcagtaagctcatcgacaaacaactccaggacgaaaagatgggctacatgtgtacgcaccgcctgctgcttctaggtgctggagaatctggtaaaagcaccattgtgaagcagatgaggatccctgatgttaatgggtttaatggagagggcggcgaagaggacccgcaagctgcaaggagcaacagcgatggtgagaaggcaacccaagtgaaggacatcaaaacaacctggaagaagccattgaacccatgtggccgcttaaccaaacctgtgccccccgtgagctggccacccccgaaacccattcagagggactacttcctgatggatga

SEQ ID NO: 102 - DNA, 8452 bp, Homo sapiens
gagaaaggctctactaaaaggccaactgaaatccaaaaagaactacttcagtaactctccatgggatatagaggagaaaggcactggaggcttcggtgccagcagtttaaagactgactggagagagggcggaggtggagcaagatggctgaatagaaccccccccgagatagttctccacacaggaacaccaaatagaacaactatccacgcaagacagcaccttcataaaagccataaaatcaggctgcacagcaggaaagagaatccgtgtgcttggaggagagagagcaaagtactgatgcttggggagagattccttctgcttggggaaagaagagagaagagcacagaggactttgtcttgcaacttgggtatcagcttagccacaatacgataaaacatcaaacagattcccgaagcccccgattccaggctttgttcctggatagtgtttctaggcccatcctgggtcagaagggaatccactgcccggttggcaaaggttcaaatgcacaaggtgggaataaatgtgacataattgaatacctagtctggcttatgtctggttctcccttcctcaatagagctggagcaagactggctgaaatgaccaccaggcagatggcagattgggaagacaaactgaaaagtgccaccatggcaactgcaccatacaactactcttacatctttaaatatattattattgttatggctgattgtcctcacacaattggtgttgaatttggtacaagaataatcgaagttagtggccaaaaaataaaactgcagatttgggatacggcaggacaggagcgatttagggctgttacacggagctactacagaggagctgcgggagctcttatggtctatgatatcactagaagaagtacatataaccacttaagcagctggttgacagatgcaaggaatctcaccaatccaaatactgtaataattctcataggaaataaagcagatttggaggcacagagagatgttacatatgaagaagccaaacagtttgctgaagaaaatgcgtgccatgtttctctgggacatgtttctctccttggcttggcattcaaggcccttcacaatcagcccaatacggagagaactgtcacaatggcagttaaattcaacatgagctttggaggggacactaaaaccatagcactatcttttggaagaaaggaggggaatgagagggagaggtatggcaaaagtgagctccaagatataagcaagttgaaaccgcttcaagatttgatttctctgatcctagttgaaaatccagttgtgacccttcctcattacctccagtttaccattttccacctccgttcattggaaagtttggaaggtcagccagtaaccactcaggatagacaggaggcttttgagagattcagtttagtgttggaaattctggccagggcaatcaggcaggagaaagaaataaaggatgttcacttaggaaaagaggaagtcaaattgtccctgtttgcagatgacgtgattgtatatttagaaaaccccattgtctcagcccaaaatctccttaagctgatacgcaacttcagcaaactctcaggatacaaaatcaatgtgcaaaaatcacaagcattcctatacaccaatgatagacagacagagagcagaatcatgagtgaactcccattcacaattgcttcaaagagaataaaatacctaggaatccagcttaaaagggatgtgaaggacctcttcaaggagaattacaaaccactgctcaacgaaataaaagaggacacaaacaaatggaggaacattccatgctcgtggataggaagaatcaatatcatgaaaatggccatactgcccaaggtaatttatagattcaatgccatccccatcaagctaccaatgactttcttcacagaattcgaaaaaactactttaaagttcatatggaaccaaaaaagagcctgcattgccaagacaatcctaagcaaaaagaacaaagctggaggcatcacactacctgacttcaaactatactacaaggctacagtaaacaaaacagcatgggacatggttgaagctggaaaccatcattctttgcaaactgtcacaaggacagaaaaccaaacaccgcatgttctcactcataggtgggaactgaacaatgagaacacttggacacaggaagaggtagaaagactggaaagagacctagaaaaaaagatgatagaaactgaagagcttaagagcaaacaaacaaggttccttgaggaaattaaaaatcaagataaattgaataaatcattaaaagaggaggccatgttacagaaacagagctgtgaggaactcaagagtgacttaaacacaaaaaatgaattgtatgctgaaattgataaagccccagatgaaagcccttacattggcaaatccagatacaagagaaatatgtttgccacagagagttatattattgacagtgctcaggcagtacagatcaagaagatggagccagatgaacaacttagaaatgatcacatgaacttgagaggccacacaccactggacacgcaactggaagacaaagaaaaaaaaataagtgcagcacaaactcgactatcagaactgcatgatgaaatagaaaaggcagaacaacaaattttgagagctactgaagaatttaaacaactggaagaagctatacaactaaaaaaggaggctgttgttcagtacaggcaagagatgatactagcaccaaccaggaaggtgctggtggatgtggagagaaagccagctgattccaggaaacactggacagtagaactgacaggacttaatgatgggttgaaagtaggagatgagttgagtggtagactacaacttgtaaataaattacgccaggaagctctggatctagaactgcagatggaaaagcaaaagcaggaaattgccggaaagcagaaggagattaaggacctgcaaatagccatagatagcctggattccaaagacccaaaacattcccatatgaaggctcaaaagagcggtaaagaacaacagcttgacattatgaacaagcagtaccaacaacttgaaagtcgtttggatgagatactttctagaattgctaaggaaacggaagagattaaggaccttgaagaacagcttactgaaggccagatagcagcaaatgaagccctgaagaaggatttagaaggtgttatcagtgggttgcaagaatacctggggaccattaaaggccaggcaactcaggcccagaatgagtgcaggaagctgcgggatgagaaagagacattgttgcagagattgacagaagtcgagcaggagagagaccagctggaaatagttgccatggatgcagaaaatatgaggaaggagcttgcagagctagaaagtgccctccaagagcagcatgaggtgaatgcatctttgcagcagacccagggagatctcagtgcctatgaagctgagctagaggctcggctaaacctaagggatgctgaagccaaccagctcaaggaagagttggaaaaagtaacaagacttacccagttagaacaatcagcccttcaagcagaacttgagaaggaaaggcaagccctcaagaatgcccttggaaaagcccagttctcagaagaaaaggagcaagagaacagtgagctccatgcaaaacttaaacacttgcaggatgacaataatctgttaaaacagcaacttaaagatttccagaatcaccttaaccatgtggttgatggtttggttcgtccagaagaagtggcagctcgtgtggatgagctaagaagaaaactgaaattaggaactggggaaatgaacatccatagtccttcagatgtcttagggaaaagtcttgctgatttacagaaacaattcagtgaaattcttgcacgctccaagtgggaaagagatgaagcacaagttagagagagaaaactccaagaagaaatggctctgcagcaagagaaactggcaactggacaagaagagttcaggcaggcctgtgagagagccctggaagcaagaatgaattttgataagaggcaacatgaagcaagaatccagcaaatggagaatgaaattcactatttgcaagaaaatctaaaaagtatggaggaaatccaaggccttacagatctccaacttcaggaagctgatgaagagaaggagagaattctggcccaactccgagagttagagaaaaagaagaaacttgaagatgccaaatctcaggagcaagtttttggtttagataaagaactgaagaaactaaagaaagccgtggccacctctgataagctagccacagctgagctcaccattgccaaagaccagctgaagtcccttcatggaactgttatgaaaattaaccaggagcgagcagaggagttgcaggaagcagagaggttcagcagaaaggcagcacaagcagccagagatctcacccgagcagaagctgagatcgaactcctgcagaatctcctcaggcagaagggggagcagtttcgacttgagatggagaaaacaggtgtaggtactggagcaaactcacaggtcctagaaattgagaaactgaatgagacaatggaacgacaaaggacagagattgcaaggctgcagaatgtactagacctcactggaagtgacaacaaaggaggctttgaaaatgttttagaagaaattgctgaacttcgacgtgaagtttcttatcagaatgattacataagcagcatggcagatcctttcaaaagacgaggctattggtactttatgccaccaccaccatcatcaaaagtttccagccatagttcccaggccaccaaggactctggtgttggccttaagtactcagcctcaactcctgttagaaaaccacgccctgggcagcaggatgggaaggaaggcagtcaacctccccctgcctcaggatactgggtttattctcccatcaggagtgggttacataaactgtttccaagtagagatgcagacagtggaggagatagtcaggaagagagtgagctggatgaccaagaagaacccccatttgtgcctcctcctggatacatgatgtatactgtgcttcctgatggttctcctgtaccccagggcatggccctgtatgcaccacctcctcccttgccaaacaatagccgacctctcacccctggcactgttgtttatggcccacctcctgctggggcccccatggtgtatgggcctccaccccccaacttctccatccccttcatccctatgggtgtgctgcattgcaacgtccctgaacaccataacttagagaatgaagtttctagattagaagacataatgcagcatttaaaatcaaagaagcgggaagaaaggtggatgagagcatccaagcggcagtcggagaaagaaatggaagaactgcatcataatattgatgatcttttgcaagagaagaaaagcttagagtgtgaagtagaagaattacatagaactgtccagaaacgtcaacagcaaaaggacttcattgatggaaatgttgagagtcttatgactgaactagaaatagaaaaatcactcaaacatcatgaagatattgtagatgaaattgagtgcattgagaagactcttctgaaacgtcgctcagagctcagggaagctgaccgactcctggcagaggctgagagtgaactttcatgcactaaagaaaaggtttgtcttcttgtggtttggggtgtgagctcagtgtggacaaaaaatgctgttgaaaagttcactgatgccaagagaagtttattgcaaactgagtcagatgctgaggaattagaaaggagagctcaggaaactgctgttaacctcgtcaaagctgatcagcagctaagatcgctccaggctgatgcaaaggatttggagcagcacaaaatcaagcaagaagaaatcttgaaagaaataaacaaaattgtagcagcaaaagactcagacttccaatgtttaagcaagaagaaggaaaaactgacagaagagcttcagaaactacagaaagacatagagatggcagaacgcaatgaggatcaccacctgcaggtccttaaagaatctgaggtgcttcttcaggccaaaagagccgagctggaaaagctgaaaagccaggtgacaagtcagcagcaggagatggctgtcttggacaggcagttagggcataaaaaggaggagctgcatctactccaaggaagcatggtccaggcaaaagctgacctccaggaagctctgagactgggagagactgaagtaactgagaagtgcaatcacattagggaagtaaaatctcttctggaagaactgagttttcagaaaggagaactaaatgttcagattagtgaaagaaaaactcaacttacacttataaagcaggaaattgaaaaagaggaagaaaatcttcaggttgttttaaggcagatgtctaaacataaaaccgaactaaagaatattctggacatgttgcaacttgaaaaccatgagctacaaggtttgaagctacaacatgaccaaagggtatctgaattagagaagactcaggtggcagtgctagaggagaaactggagttagagaatttgcagcagatatcccagcagcagaaaggggaaatagagtggcagaagcagctccttgagagggataaacgagaaatagaacgaatgactgctgagtcccgagctttacaatcgtgtgttgagtgtttgagcaaagaaaaggaagatctccaagagaaatgtgacatttgggaaaaaaagttggcacaaaccaaaagggttttagcagcagcagaagaaaatagcaaaatggagcaatcaaacttagaaaagttggaattgaatgtcagaaaactgcagcaggaactagaccaactaaacagagacaagttgtcactgcataacgacatttcagcaatgcaacagcagctccaagacttagtagatactggattggcactgaccacctctagtaaagatggctttattagtagtttccacttgttctttcacctaaaggacctgcttcacaccaccaagcatcaggatgtgttgctcagtgagcagacccgactccagaaggacatcagtgaatgggcaaataggtttgaagactgtcagaaagaagaggagacaaaacaacaacaacttcaagtgcttcagaatgagattgaagaaaacaagctcaaactagtccaacaagaaatgatgtttcagagactccagaaagagagagaaagtgaagaaagcaaattagaaaccagtaaagtgacactgaaggagcaacagcaccagctggaaaaggaattaacagaccagaaaagcaaactggaccaagtgctctcaaaggtgctggcagctgaagagcgtgttaggactctgcaggaagaggagaggtggtgtgagagcctggagaagacactctcccaaactaaacggcagctttcagaaagggagcagcaattggtggagaaatcaggtgagctgttggccctccagaaagaggcagattctatgagggcagacttcagccttctgcggaaccagttcttgacagaaagaaagaaagctgagaagcaggtggccagcctgaaggaagcacttaagatccagcggagccagctggagaaaaaccttcttgagcaaaaacaggagaacagctgcatacaaaaggaaatggcaacaattgaactggtagcccaggacaaccatgagcgggccaggcgcctgatgaaggagctcaaccagatgcagtatgagtacacggagctcaagaaacagatggcaaaccaaaaagatttggagagaagacaaatggaaatcagtgatgcaatgaggacacttaaatctgaggtgaaggatgaaatcagaaccagcttgaagaatcttaatcagtttcttccagaactaccagcagatctagaagctattttggaaagaaacgaaaacctagaaggagaattggaaagcttgaaagagaaccttccatttaccatgaatgagggaccttttgaagaaaaactgaacttttcccaagttcacataatggcccaactccgacactgtatgtccaagcaagcagaagtattaattaaaggaaagcggcagacagagggcactttacacagtttgaggagacaagtagatgctttaggggaattggtcaccagcacctctgcagattcagcgtcatcacccagtctgtctcagctggagtcttccctcacagaggactctcaacttggacaaaatcaggcagacagtgtcagaattgaactgaataagaggacatgcagctggtgtccactgaagaagtatctggtgtatggggcaacaacccttacatgtctgatgtcacaagtattgtactgtgtggtacggcagtag

SEQ ID NO: 103 - DNA, 1171 bp, Homo sapiens
tttgatttctagatctttatttacagggtttttgtttcatttgccagtgatatagttcgaatttttttaaaaaggcttgtagtatattatgacccattgagatgcatttgctcttccaaaaagcacgtgtacaggtctcttctgagcacatctgctcctctttatgcacaccaggaaaagattaactcagctgttctgttttccagatttgactgaagaacgacttggagacggcaagtcggcagacaatacagaggtcttcagtgacaaagacactgaccagaggagttccccagatgtggcaaagagtaagggctgcttcacccctgagagccctgagatagtgtccgtggaggaagggggatacgctgtccagaaaaacggaggcaaccccgagagccgccctgacagccccaagtgtcacgcggagcagaatcacctcctgattgagggcccctcggggactgtttctctgcccttcagcttgaaagccaacagaccgccgcttgaagtgttaaaaaagatattccccaaccagaagccaacggtgcttgagctcatcctcaagggctgtggcggggacctggtgagcgccgtggaagtccttctgtccagccgatcctcagtcacgggagcagagcgaacttccgcagaacctgagagtctagcgttgccctccaatgggcacatctttgaacacaccttgagctcctaccccatctcgtcttccaaatggtctgtgggatcagcctttcgagtcccagacacgttgaggttttctgccgactctagcaacgttgtccccagtcccttggctgggcctctgcagccccctttcccccagccaccccggtacccgctgatgctgaggaatactttggcgagaagccagtcgagcccctttttgcccaatgatgtcaccctgtggaacaccatgacgctgcagcagcagtatcagctgaggtcccagtatgtcagtcctttccccagtaactctaccagcgtcttcagaagctcgcccgtccttcctgcccgcgccacggaagaccctcggatttccatccctgatgatgggtgtccatttgtgtcaaagcagtccatttacaccgaggacgactatgacgagaggtctgactcctcagactctagaacactcaacacatcatcttaa

SEQ ID NO: 104 - DNA, 491 bp, Homo sapiens
gtgagttgggtggacaccaccaacagacgtgtccccacttcagacctggcgggacactgttcaaccagaactccaccaaccagctggcagcagtaccccagcactgggatctgtgggaaaccagaagcactccagcggcacgccatcaaatgccccaaaacgccagaaagtggaggagctgggtcctcatccaggtgcagaaccagctccggtacagccagctccccaccaccctgcacaactgcccctggagctgccccagcggacaaaaagccggtcgggggacaaaggcctgcggccgcgcctgcgcgcaagcctttggggcgctccggtaccccggcctggccccgccccctggcgcggcgcgccgacgtcgcgtgacgtcacggagttgccatggcgtcgctgagcggcctgacagtcggcctggagtcgtacaggggccgggaccgcctggttatatgcaaaagtgcatctttggagagggttga

SEQ ID NO: 105 - DNA, 1124 bp, Homo sapiens
atggaagccacctggcgagctcagggcgccagtcccgctcagcccgggcacatcctccggctgcccgcgcacctctccacgccggccccgttccgcggcatcgccatcggatgcgctcggctcccgcgggcgctcggccccgagcccctcctccccctacccgccggccggacagggaggagccaatggctgggcctgccatccacaccgctcccatgctgttcctcgtcctcctgctgcccctggagctgagcctggcaggcgcccttgcacctgggacccctgcccggaacctccctgagaatcacattgacctcccaggcccagcgctgtggacgcctcaggccagccaccaccgccggcggggcccgggcaagaaggagtggggcccaggcttgcccagccaggcccaaggatggggctgttggtcaccgccaccaggcaggcctccaggctgccagaggctgaggggctgctgcctgagcagagtcctgcaggcctgctgcaggacaaggacctgctcctgggactggcattgccctaccccgagaaggagaaccgacctccaggttgggagaggaccaggaaacgcagcagggagcacaagagacgcagggacaggttgaggctgcaccaaggccgagccttggtccgaggtcccagctccctgatgaagaaggcagagctctccgaagcccaggtgctggatgcagccatggaggaatcctccaccagcctggcgcccaccatgttctttctcaccacctttgaggcagcacctgccacagaagagtccctgatcctgcccgtcacctccctgcggccccagcaggcacagcccaggtctgacggggaggtgatgcccacgctggacatggccttgttcgactggaccgattatgaagacttaaaacctgatggttggccctctgcaaagaagaaagagaaacaccgcggtaaactctccagtgatggtaacgaaacatcaccagccgaaggggaaccatgcgaccatcaccaagactgcctgccagggacttgctgcgacctgcgggagcatctctgcacaccccacaaccgaggcctcaacaacaaatgcttcgatgactgcatgtgtgtggaag

SEQ ID NO: 106 - DNA, 432 bp, Homo sapiens
gaagcatcatcacgccaagcttggcacgaggcgactgtgagcagagccccacatcctcgcgcacgtcttccctgggctctggcggccccgactgcgccatcacagtcaagagccctgggagggagccggggcgtgaccacctcaacggggtggccatgaatgtgcgcactgggagcgcccaggccgatggctccgactctgagaaaccgtgaggcaagcccgtcaccccacacaggctgcggcatcaccctcagaccttggagcccaaggggccactgcccttgaagtggagtgggcccagagtgtggcggtccccatggtggcagccccccgactgatcatccagacacaaaggtcttggttctcccaggagctcagggcctgtcagacctggtgacaagtgccaaaggccacaggcatgagggaggcgtg

SEQ ID NO: 107 - DNA, 456 bp, Homo sapiens
gactccaccaacctccaccccattccacacaaagatgtcttccccatcagcaatttcagtttcacacagtgtcagttcatccccgccaagtgactggtaaatgtgaagtcctgctggtacaagctttgcaacactaagaaccatgtctccttcccaaaattctaacagctgaaatattgactgctggagatctcctaaagtttttcttttatcaaaggtcaaatcccacacgctttctgtttgagagactactgggtgcagagccccattgaagaaatgatactgagggcccaggtgaagatgcaattcaaaagtattgtttgcagaatcacattctgcccttttggtttgcagttcaatgttagctgcatccatttcattcagtaaatgacatggaaccccatatcttggattagctcgagcttcagggggtctctgcaactggaattccacgac

SEQ ID NO: 108 - DNA, 456 bp, Homo sapiens; identical to SEQ ID NO: 107

SEQ ID NO: 109 - DNA, 1311 bp, Homo sapiens
gtgcctggtggggtggaggtgccaggtgtgtccagaggagcccaatgggcagtgaggcagccatggggctggatgcactggtgcccctggcagtgacagtggccatcttcctgctcctggtggacctgatgcagcagcaccaacgctggactgcacgctacccgccaggccccctgctggggggaccctggcctgatggaggccctgacccaacggaggccctgaccctccctctacagctgcggcaccgctttggggacgtgttcagcctgcagctggcctggatgccggtggtcgtgctcaatgggctggcggccgtgcgtgaggctctggtgacctgcggcgaggacaccgccgaccgcccgcctgcgcccatctaccaggtcctgggcatgggcggcggagggcggggccaaggcctccatgaccacgcccatgtgtccgtcccgcccccaggggtgtttctggcacactacggacacgcgtggcgcgagcagaggcgcttctccgtgtccaccttgcgcaacttgggcctgggcaagaagtcgcgggaactgggaaggtggaggactgggaaggcgacccctgacccgcatctcccgcccccaggacgcccctttcaccccaacggcctcctgaacaaagcggcgagcaacgtgatcgcctccctcacctgcgggtgccgcttcgagtacgacgacaggtgcagaatgtggaggtcatttgggggctttcccgttctgtcccctgagtaccctctcagccctgctcaggccaaggggaaccctgagagcagcttcaatgatgagaacctgcgcatggtggtggctgacctgttctttgccgggatggtgcgtgtctgtccaggccgtgtccaacagatcgacaacgtgatagggcaggtgtggtgaccagagatgggtgaccaggctcgcatgccctgcaccactgccgtgattcacgaggtgcagcgctttggggacatcgtcctgcttgggggtcccagcatcctagagtccagtccccactctcaccctgcatctcctgcccaggggatgatgctcttcaccaacctgtcatcggtgctgaaggatgaggccgtctgggagaagcccttccgcttccaccccgatggagtcttgcaggggtatcacccgggagccaggctcactgacgcccctcccctccccacaggccgccgtgcatgcctcggggagcccctggcccgcatagagctcttcctcttcttcacctccctgctgcagcacttcagcttctcggtgcccaccggacagccccggcccagccact

SEQ ID NO: 110 - DNA, 1246 bp, Homo sapiens
tttcgcttccccagtgaggaaactgggattcagagaagtcaaagtcaccagcaaggaagtggccgagtctgaacttgaactccctggtggtgccgccagtgcactttcctcctcctgagatgtgggttgattcttttaaagccttgtgaataacactcttgggcttagaagggtccccagtgttcatattggctcgaaagatgggcccacagctaccactgcaaatctgctccagaacttcagagagttgctcccgcggcacctgcagcttagccagggcaggtgtggtagctcccagaaagttttccacggatgtctccttaagtggcaaagccacatttcctccatgtcctgcttcccagcttaggtcccctttaagatcaacgttcttgagcagatcacgaagcatatcgaaaaactgcagtgcggaggtgtagtcaaacaactcagcaggcgtgggaacaatcagcacatcagcagcacatacgacattaatcgtgccgatacccaggttaggcgcgctgtcaataactatgacatcatagtcatgagcaacagtttcaatggccagtcggagcatcaggtgtggatcggtgggcagtttaccttcatcaaatttgcccattaactcagtttcaatacggtgcagagccagacaggaaggaataatgtcaagccccggccagcaagtgggctttattgcataagtgacatcgtccttttccccaagatagaaaggcaggagagtgtcttctgcatgaatatgaagatctggtacccatccgtgatacattgaggctgttccctgggggtcgttaccttccacgagcaaaacacgtagccccttcagagccagatcctgagcaagatgaacagaaactgaggttttgtaaacgccacctttatgggcagcaaccccgatcaccggtggaaatacgtcttcagcacgtcgcaatcgcgtaccaaacacatcacgcatatgattaatttgttcaattgtataaccaacacgttgctcaacccgtcctcgaatttccatatccgggtgcggtagtcgccctgctttctcggcatctctgatagcctgagaagaaaccccaactaaatccgctgcttcacctattctccagcgccgggttattttcctcgcttccgggctgtcatcattaaactgtgcaatggcgatagccttcgtcatttcatgaccagcgtttatgcactggttaagtgtttccatgagtttcat

SEQ ID NO: 111 - DNA, 910 bp, Homo sapiens
atgttaggtgatgctacatggtatgcagaaaaacagcaggccaagagagatagagataaggggacacttgagcagagacctgaaggtaatgtgggaatgctgggggaagagccttccagagccatcggccaggtaccaaagctcagctgtatggattcccaacaggaggacctgcgcttccctgggatgtgggtctcattgtactttggaatcctggggctgtgttctgtgataactggagggtgcattatctttctgcactggaggaagaacttgaggcgggaagagcatgcccagcagtgggtggaggtgatgagagctgccacattcacctacagcccattgttgtactggattaacaagcgacggcgctacggcatgaaatgcagccatcaacacgggccctgcccctgctgtcaccaagactgagactgaggtccagaatccagatgttctgtgggatttggacatccccgaaggcaggagccatgctgaccaagacagcaaccccaaggcggaagcccctgctcccctgcaacctgcactgcagctggctccacagcagccccaggccagatccccattcccacttcccatctttcaggaggtgccctttgccccacccttgtgcaacctaccccccctgctgaaccactctgtctcctatcctttggccacctgtcctgaaaggaatgttctcttccattccctcctgaatctggcccaggaagaccatagcttcaatgccaagccttttccttcagaactgtagcctcctctcactgaaggtgggagctgcaggaatcaggtgcagagtaggaaatggaactaacctcaggaaggtggtattgacagaggtcaggacccaacctggaatgtcaaggctatgaaaacatttaaaagataaaaa

SEQ ID NO: 112 - DNA, 1051 bp, Homo sapiens
gtgtgatggtcactattctgtaaatttattgactgaaaacatcaagcagcaatggaatgttcagttcaatatcagttaaggcttccatagcagatttcccctagacaaaaataaattgtttctagtatactttgtttgggtcattcttcaaaacaattaccttgtcctttccactaggtggttgaccagattgacaccctgacctctgacctacagctggaggatgagatgactgacagctccaaaacggacacgctgaatagtagctcaagtggcacaacagcctccagcctagagaagatcaaagtgcaggctaatgcaccgcttattaaacccccagcacacccatctgctatcctcacggtcctgagaaagccaaaccctccaccacctcctccaaggttgacacctgtgaagtgtgaagaccccaaaagggtggttccaactgccaatcctgtaaaaaccaatggcacccttctacgaaatggaggcttaccaggtggacctaacaaaattccaaatggagatatctgctgcatacccaacagtaacttggacaaggctccagtccagcttctgatgcatagacctgaaaaagacagatgtccccagggcagggccttcgaggaacgagttcggtttaatgaaaaagtacagtaccatgggctattgtcctggactgtgatacccggtattaacattaaaaaacaggggaggtccactttacacagtggaacctgttccacccaccggggaaaggtttccttcaccaaggccctcccctccctcctacaccccatctccctcctttcccactagaaaatgggggaatgggaataagccacagtaacagcttcccccctatcagacctgcaactgtgcctcctcccactgcaccaaaaccacagaagacgatcttgaggaagtcaaccactacaaccgtgtgatgtatgccattaaaaaaattgtttttttaattttctatattataaacataaaataagtaatgagcactttctactcaagcaataaaaagcccaaatatattaaa

SEQ ID NO: 113 - DNA, 864 bp, Homo sapiens
atgttggtcaggctggtcgccagaaggacaagacagagtcatgcagagaagaaagaccacagggggaagacggccgtctataaaccaaggagagaggcctcagaaaacaaccctgccgacaccttgatctcagccttccagcctccggaaggtgagaagatacatttctgtgatgacacccaacccatggtggcagagatgcatggcgagctgattgagttcaacgagcgcctgcacagggccctggtagccaaggaagccctcgtgtcccagatgaggcaggagctcatcgatctccggggaccggctgcagactgtgtgagtccaggggacagtgaccaaggcctgctctctgcatccctgatgcctagaacttcattatctcatggagaagccacaggatacatccatgaaactagcaatgagaatattgtgagcaaaccatgtcgattgataccaccattcccgctgcctaacaggcccatcttcctgatcaacttcaactcatccttaaaaactcaagtcaaacgtctcctctttgaaaccttccatgacataccccagcagccccagtccatggaaaaattgtcttccacgaaattggtccctggtgccaaaatggttgggaactgctgctttattttctttgtctgcacagtgggggcaatgccacccaacttggagggtggttgtgaagtgaaggataatgactctaaccaggcaaccagtgaacccacgaacaaagacttacggggaaccttctgtgcaggcctcttctgtgccctggggatatactcaggaggccagagagataagatggctgctcccaaggagtgcaggcttaataaacagttcagcaaatag

SEQ ID NO: 114 - DNA, 555 bp, Homo sapiens
atggcggaagctacaaataaattcaaattaatgaatggcaataccctggtgaatgtgttatacatcacacaacagtttgctggtgaggcccacgatccgctagttgaagcactagttacagaagcatggggtaggctagaaaggtttgatattaaactgctgtcagaattttcctcttgcttagcagatcagcatttgtattttagtccattaatgggaaaaatagctgatattgtccataggaacttggaaaccatccagaacttaagttccttgtctgtcttgatggtcaacatatcttctttaatatcacgacattttcaagaacaactggtgaacaaaacggaacttgtttttgacaccacagattcttctgaggtcaacgttgcaaaaagaatggtacagtttcttcgaaactttagatatcattatcaaccactattagaaagctttgtaaagttttttgtagcattgggacccattgcaggacctgaagaaaagaaacaacttaaatcaactatgttattgatgtcagaggagctaaccaacgagtaa

SEQ ID NO: 115 - DNA, 507 bp, Homo sapiens
ttttttctttttctcagaaaaatgtatttgcaattcaaatgttcatataaaaagcataaattttaaaaagttcatagatgtgtttttagaagtgctatggttttgccattcactgcaattacattgcaaaatgtgcagggtggtccacactgcatcatcttatgcttttgtcacactgaagtcactctcatcacaacctcccccgagctgttatcttctgataagtcttcatggggcctcatccgattgaacaggtgcaataacacatagccacatctgaaacccttggtgaggttaactgagttgggtggacccaagttttctgttccgcagagctgtcaatggcaaccacaaagtcctacttgtggaagactctccccggctgctttcttcgatgtctgtggctttgtcataatttaacacatcccagtgcaaattcacagctcgccagcgcttaaacactctgtaaactgcagctccttcatgaacaatgagaccttcaatctg

SEQ ID NO: 116 - DNA, 430 bp, Homo sapiens
ctgcgggcggaggagcggccatgccgccgcggcgcatcatcgtggaggtgaaggtgctagacgtgcagaagcggcgggtgcccaacaagcattatgtctacatcatccgggtcacgtggtccagcggctccaccgaggccatttaccggcgctacagcaagttttttgacctccagatgcagatgttggacaaatttcccatggaaggaggacagaaggaccccaagcagcggatcatcccctttctgccaggtaagattctcttcagacgaagccacatccgggacgtggctgtcaaacgcctgataccaattgatgaatactgtaaggccctcatccagctgcccccctacatctctcagtgtgatgaggtgctgcagttctttgagacaagacctgaggacctgaatccccccaaagaggagcacat

SEQ ID NO: 117 - DNA, 838 bp, Homo sapiens
atgtcggcatacctgcagatgctaattctaggtcagtcttctcagttgccttcacaggttctgcaaacagctgactattgctggggaaaaccccccagctgtgcgggtgtggtccctattcatggtctccatcctggggtctgtatgctacgaggacaatggtccttagccttgaatgaatatgggaatcatcagcttgggtaccagatccagccacgtttttggtgccacaacccaaggagctggagggtaaggatccacagaggggaagggatagaggagatgagaggaaggagaggaaagaagagaagagaagagaagagagaaagggtgaggatgaccagctcagtacccagtgttctgcagctctggaagatagtgccaaatggttcttcaagaaatcatattcataaaaaggcaccagttcctgaaattgaatcatctgagttttaccttttcatgtgcacacatgaaacagacctaaaacattcccagatgtgccctcttctcatgggagttgatggatctcctgcttcactggattactgcgagccaccagagtacgcagaaactcctacagctcagtacctgcccaagtggctgccagctggagcccctgctatgggtctgcacagctttgtgcttgggacccaaggccctggtggtgtggactcacaaagggattacctgttctggggtttgcaaaaatctgtgggtaaagcacagttctccgggcgcctggctgaagagagcatggcttcagtggcatgggccgtcctcaaggtgcagctgcttctccccattcagacttggagccccgtaggagcaggacatccac

SEQ ID NO: 118 - DNA, 783 bp, Homo sapiens
atgctgtgcagcactgctgtccccaaggcagagctgcttccaggtggcaacctcggtggtgccggggagcgggagaaggtgccggccaaccccgaggcgctcctgctcatggccagctcccagcgtgacatggaggactgggtgcaggccatccgccgagtcatctgggccccgctgggcggagcgctcaaggcttctcccctgccagagccccaggagcctgagaacttggatccccaaggcagaggaaatggcctccagccacagccaccctcccccacccctgctgatgggacagccacagagctgtttaccagaacaaaggcccgagcagctgccttatctagggagagcctgggctgctcagagctggcaggtccctgggccgtgggaatgccaggctctgttgggaccgggcctggggcggcgctggccggggcgggcgggcggcgggcaagacgctacctgcgcgcgtgccgggcattccagccgccgccgcgccgccgcgataggcgcgccatgggcctgatgccggccgcgcgggcctactccgggatgcagcgactgcccgcagacgtcctgccgactgctcgcctgctgctcagcccaccgccccacacgccggccatgcttccgtcggcgtctgccgccatccctgcctccgctgatagcgccccaacactagatactcatcgggcgcccatcgtcgacgcagattatatctatttatcagtcatctacacgcaaattgaagagggcgttaagctgctcttcggaacataa

SEQ ID NO: 119 - DNA, 476 bp, Homo sapiens
ttttttttttttttttttatcatacaacaaattaacacaaatttattgggtggaaaatgtgaaaagggacaaaaaaaaggggtagttttgtactgatataagagttcataaagtgataaactcaggtccaaaatcttcagcccacatcaaagacttcatgttcttatgactctagaaacaggccagccccggctgctgggctcttggaatcatggagtgtagctacacataaagaagctcccttgtcaaggacatcacttcctctgtacctcagaatgatacttcttgggcatgggcctaagattctgttttctctcccatcgatgcagaacagattggttggacatgacatcatgttttacatcttggtccttttcctgccacctgtcttccccagaaggcctctgcaaccggttttttgtcagctcaagttgtagaccatcaaacctgtgcttaaaccagcgatgagcttcttc

SEQ ID NO: 120 - DNA, 2358 bp, Homo sapiens
tcctagggcataaaaccagccagcttcaataaagtcactgatcctgaagtcaaagaaatcattgaaggatgtattcgtcaaaacaaatctattaggttgtctatcagggacctattaaaccatgcattttttgctgaggatacaggactgagggtggagttagcagaagaagatgattgctcaaattcatcccttgctttaagactctgggttgaagaccctaaaaaattgaaaggcaaacacaaagacaatgaagctattgaatttagtttcaacttagaaacagatacacctgaggaagtagcatatttgtaggtcaagtctgggttcttccatgaaagtgattccaaagctgttgctaaatccattagagaccgggtgacgccaataaagaagacaagagagaagaagcctgctggctgtttggaagaacgcagggattctcagtgcaagtctatggggaatgtattccctcagccccagaatacaactttaccccttgctcccgctcagcaaactggggctgaatgtgaagaaactgaagttgatcaacatgttagacaacagcttctacaaagaaaaccacagcagcactgctcctctgttataggtgacaatttgtctgaggcaggagctgcatcagttatacattcagatacttcaagtcagcccagtgtagcctattcctcaaatcaaacgatgggctctcaaatggtttctaatatcccgcaggctgaagtaaatgttccagggcaaatttattcatctcagcaactagtaggacattaccagcaagtttaacagttacagaagcattcaaagctgactcagccgcagattttgcctttggttcaaggtcagtccactgttttacctgtacatgtccttggaccgacagttgtttcacaaccccaggtttccccattaactgttcagaaggtcccacagtcacagatgacttcccagcatccaacagttggtcttcaacttgagcgtgatcctagaaatgggaatcaggcattaaccaaagcaccagatgccagtcagacttctagtttcttaccggttaatcaccctcaagctttgttgaatcattcttctgtccttcagattcttcaatgccacaaagccagactgtgcaaggagtattgtttccaagcttgtattcagcaacaatcattaattttacaacctaagattttggcatctccacagaaaaatgttcagcaggattatgttctccaagagtctgaagctcttgcaagtcagcaacagccaattccagggccacctgcggaattatcatccttcccattgaaggctcctgagcagctgccctttgtgatatgtccccagcaacaaacttcttactcatcacagccaacttactcaattcaggctccactacataaacagcctgtttattcactgccagtcctggagcatcctctttacactgtacaaccaccgagatcacagccagcctattctgtgcagacttcttatccagtcccagctgcagtacagccctcatatttggcaaagactcacgtgcagtctgcttatctagtgcaacctctgcttcagtcaccttttccagaccaggcagcatatgcaatccaggcagcttaccttatgcaacctatggaacagcttgcttatcagacactgtctcttgagcatgtatcttatttaggacaaactgcttacactatccagataactgaacatgcaaccttcataaccgtccagctttcagcgactccatcccaagcagatgtcagttttggacaccagcagctaaaaactcaggcccaggcaactagcattatatctcagagggcagtggaaggacagcttcaaaaccctgagcagatgtccttcattcagcaggcctcttcacaggcacagatccagcccccacatttctcagcacagttttcccaatcacatctagcaccaagccaggtttttcacttagctttcattcagcagcagcagatgactcattcatctcatagacaagcacaggaaacccatcagttgtctactcaggaaggtcccataaatcaacagcaatctttatttagtcaacatgctgctctccagtgacaggcacctaagcaagttcagccattaccaggtattccaaacaccattacaaacatggtccagattatacatccattgcaagaacagttgcaactggcagccctggaacaacaatatataatacagcctttagagcagcctcaagtacttcaggcactagataacagtctgacttttcccctacagaaaaacctagcacaataccagccagcatacatccagcagcagtctgctgactggccgcag

SEQ ID NO: 121 - DNA, 1398 bp, Homo sapiens
tcgaagactgagcggttgtggccgcgttgccgacctccagcagcagtcggcattctctaacgcagaaacccgggagtaggagactcagaatcgaatctcttctccctccccttcttgtgagatttttttgatcttcagctacattttcggctttgtgagaaaccttaccatcaaacacgatggccagcaacgttaccaacaagacagatcctcgctccatgaactcccgtgtattcattgggaatctcaacactcttgtggtcaagaaatctgatgtggaggcaatcttttcgaagtatggcaaaattgtgggctgctctgttcataagggctttgccttcgttcagtatgttaatgagagaaatgcccgggctgctgtagcaggagaggatggcagaatgattgctggccaggttttagatattaacctggctgcagagccaaaagtgaaccgaggaaaagcaggtgtgaaacgatctgcagcggagatgtacgggtcagtaacagaacacccttctccgtcccctctactcagctcctcttttgacttggactatgactttcaacgggactattatgataggatgtacagttacccagcacgtgtacctcctcctcctcctattgctcgggctgtagtgccctcgaaacgtcagcgtgtatcaggaaacacttcacgaaggggcaaaagtggcttcaattctaagagtggacagcggggatcttccaagtctggaaagttgaaaggagatgaccttcaggccattaagaaggagctgacccagataaaacaaaaagtggattctctcctggaaaacctggaaaaaatggaaaaggaacagagcaaacaagcagtagagatgaagaatgataagtcagaagaggagcagagcagcagctccgtgaagaaagatgagactaatgtgaagatggagtctgaggggggtgcagatgactctgctgaggagggggacctactggatgatgatgataatgaagatcggggggatgaccagctggagttgatcaaggatgatgaaaaagaggctgaggaaggagaggatgacagagacagcgccaatggaggatgactcttaagcacatagtggggtttagaaatcttatcccattatttctttacctaggcgcttgtctaagatcaaatttttcaccagatcctctcccctagtatcttcagcacatgctcactgttctccccatccttgtccttcccatgttcattaattcatattgccccgcgcctagtcccattttcacttcctttgacgctcctagtagttttgttaagtcttaccctgtaatttttgcttttaattttgatacctctttatgacttaacaataaaaaggatgtatggtttttaaaaaaaaaaaaaaa

SEQ ID NO: 122 - DNA, 536 bp, Homo sapiens
acgaggagcccgagcgccccacaggggcccaggtgaagcgtcacgcctcctcctgcagtgagaagtcccatcgtgtggacccgcaggtcaaagtcaaacgccacgcctccagtgccaatcaatacaagtatggcaagaaccgagccgaggaggatgcccggaggtacttggtagaaaaagagaagctggagaaagagaaagagacgattcggacagagctgatagcactgagacaggagaagagggaactgaaggaagccattcggagcagcccaggagcaaaattaaaggctctggaagaagccgtggccaccctggaagctcagtgtcgggcaaaggaggagcgccggattgacctggagctgaagctggtggctgtgaaggagcgcttgcagcagtccctggcaggagggccagccctggggctctccgtgagcagcaagcccaagagtggggaaactgcaaataaaccccagaacagcgttccagagcaacctctccctgtcaactgtgtctctgagctgaggaagaggagc

SEQ ID NO: 123 - DNA, 1762 bp, Homo sapiens
  misc_feature (1)...(1762): n = a,t,c or g
cggacgcgtgggtttttttttcgccggaaatcccggaagtgacagctttgggggtttgctgctgggtctgactcccgtcctgcgatgggttgctgacgggggaacaatccccaagaggcatgaacctggtgaaggggccgaagaaggttgagaaggtcgacaaagatgactgaattagtggcccaatggaactattgtactctaagttcaggaaatattaagacgaccaatagttgcctgtgaacttggcagactttataacaaagatgcccgtcattgaatttctcttggacaaatctgcagaaaaggctcttgggaagggcagcatctcacattaaaacgcattaacgaattgttgacagagctgaaagctttctgataatccctgccctgggaaggggataaagggaaacactaaaggtgacaaagcacgatgacctccaagcgggcgcgtntttcatcttcccccgttggtgggcctgggagatggaacggccgacacaggttcttgcttccttcgggtggttgcggcttgtgttgtttttcttgagcggagccttggaaagagataaaagcggaattttgccacacgtgtggggctggcctttccagggaggatgatgataatcgtgctcaatggcaccaaggaggatgtggacgtgctgaagacaaggatggaggagagaaggctgtagagcgaagttttaaaagaatatcaaagaaacccaaggcagcagagtctgtttccaaaacccagatgtcagtggaaggaagccccagggcccatcaaaagttaagaccagggaagccctgaagaagcccagcccttgattctagagagaagaaaaccaacttggctcccaaaagcacagcaatgaatgagagctcttctggaaaagctgggaaagcctccgtgtggagccacaaagaggtccatcgctgaccagtgaagaatcggaggcctacaagtccctctttaccactcacagcttccgccaagcgcttccaaggaggagtctggcccactggggttcaccccacacgtcctacttgcttctgaagcccgcactgccaccggctcctgccccagaaggttgtttaagtttccacgtagggcaggttcgtttgtgcctctgagttgcgctgcttgtgtgttcttttctattagtttttgttgttcataaaaggtgttcctgggccagccttcaagctgggtgtggcccactctttgatgtgagggcgtgttcggttcccaggggggggacatggggaggggcttgcacagtggccccgaaggtccatgccttgccttcccaccctgccaggtgccatttggtccctttccccatggccccagggaacgcctttggggctgcacctttttatgccttgccagtaacaagagactcccagagtccctcaccggtgcaagagttggcacatattaattaactaaaattcctaatgatccttgctaccagcaataaaatcaagtaggcccaagtgaaactgggctttaaaaaggatggatttccaatacccctgtgcccactagaagcttcggaagggcctcgtccctctgctacagccctgggaggagccaggatccttgttggtctagctaaatactgttaggggagtgtgccccatctcatcattctcgaagatagcagagtcatagttgggcacccggtgattgaggtcaaaaaataaagctggtctgtctcttcccaatattttgtgaaaaggtaaaacgggaaag

SEQ ID NO: 124 - DNA, 1633 bp, Homo sapiens
ttggggtccattgcaacccgaggcgagactagagttcccaagcgagaagggaagaggcagtgggtgcacgtggaaggcggacagagggctggaaacaagacgctccagaatcaggagcttcccctcaggaaatagcatcctgtgtccccgcactgcagttgtctggtctctccagcagtttggtacttccggctgctgcaatgcgtgtggtggtgattggagcaggagtcatcgggctgtccaccgccctctgcatccatgagcgctaccactcagtcctgcagccactgcacataaaggtctacgcggaccgcttcaccccactcaccaccaccgacgtggctgccggcctctggcagccctacctttctgaccccaacaacccacaggaggcggactggagccaacagacctttgactatctcctgagccatgtccattctcccaacgctgaaaacctgggcctgttcctaatctcgggctacaacctcttccatgaagccattccggacccttcctggaaggacacagttctgggatttcggaagctgacccccagagagctggatatgttcccagattacggctatggctggttccacacaagcctaattctggagggaaagaactatctacagtggctgactgaaaggttaactgagaggggagtgaagttcttccagcggaaagtggagtcttttgaggaggtggcaagagaaggcgcagacgtgattgtcaactgcactggggtatgggctggggcgctacaacgagaccccctgctgcagccaggccgggggcagatcatgaaggtggacgccccttggatgaagcacttcattctcacccatgacccagagagaggcatctacaattccccgtacatcatcccagggacccagacagttactcttggaggcatcttccagttgggaaactggagtgaactaaacaatatccaggaccacaacaccatttgggaaggctgctgcagactggagcccacactgaagaatgcaagaattattggtgaagcaactggcttccggccagtacgcccccagattcggctagaaagagaacagcttcgcactggaccttcaaacacagaggtcatccacaactatggccatggaggctacgggctcaccatccactggggatgtgccctggaggcagccaagctctttgggagaatcctggaagaaaagaaattgtccagaatgccaccatcccacctctgaagactccagtgactgctgcctccccccacaagaactcccttctcccctcagccaatgaatcaatgtgctccttcataagccattgcttctccctcacttctttcctcaaagaagcatgaggtgagagaaagccacaaagtcagtgcctggagaagggttcagcccaacatggggcccctctcatcactgaaatccctctaccttctctgggtctggcattataaagaacagctgaggctgtcattccatgagtcttcagaagaaaggacagctcagaaagtcaaagaggccaactgcccagagccacagaaaatggaggataattgaggctaagtaacctgattacaagttgtactaacatattaaaggttctgaaaagtcctgcaaaa

SEQ ID NO: 125 - DNA, 451 bp, Homo sapiens
ttcccgggtcgacgatttcgtgtggagggcacgtgcggagctgtgtctggggtctgcttccatatataccaccccgagaacaggtgactctcctggcaatgaaacctgggccaccagcccagagaggcctctcaccacagcagggaccaaggctgcctttgtgcaaggcaccagccccaccccccaaggcctgccccagcggctgaacctgaccggagcagtcagggtgctctgtgagatcgagaaggtggttgtcgccatccagaagcgcttcctgcagcaggaatccatccccgagtcctcgttgcacctcagccacccctcctgcaacgtgagccacagcaatggcacacacgtgctcctggaggccggctggagcgagtgtgggaccctcatgcagagcaacatgacgaacaccgtggtgaggaccacgctgaggaacgacctgtcc

SEQ ID NO: 126 - DNA, 994 bp, Homo sapiens
ccccagccatgaaactgcccaaggggaccaggagctctgtgtactttgcacagcacccagaaaaggagccattgccctcaaggcaggaggtcaagcagacccctgtcatcatggccaagatcaaaggtccggggcccgccaagtacctccggccatcctgcacgggctacatagatcatgacatctccatgttcaaggcaccagcttataccctgcatagccggcactcagagaagcggatggtgtgccacagcagccctgggccttgctatctcttggatcccaaaataactcggtttggaatgtccagctgcccgcaggtccccatggaggagcgcatctccaacctgcgcctgaaccccaccctcgcatcctgccagtactactttgagaagatccacccaccgggggaacgcagggctccccagtacacgtttggctaccggcgcccatacagagtgatggacctcaacccggctcccaaccagtaccagatgccactcttgctggggcccaacacccctgtcagccgagctgctccctgctacagtctggcctccagggacaagaactggttctacaaggaggatgtggcaggaggccctggacctaccacgtacgcccgacctgagccatccatctatcagaaccgcagccctacttacagcatggccaagcgcttcgcctaccctctggacctcacgccacggcctggccccggctcccacgaggtccagcaggtcactgtgcacaagccccacatccctgctttcaccatgggcatcaagcactcactccacctgtgcccactggtcatcgacattcgtgactgaggcccctcttggggcactcactgcccctcatccccagaaattatttttctacaccaaattgagcaatttgaccaagatttctagtagcagagccggtacctgctgagtgtccggcacacagaagacattagagatacattttcatgtaaaaaaaaaagccg

SEQ ID NO: 127 - DNA, 407 bp, Homo sapiens
  misc_feature (1)...(407): n = a,t,c or g
gccacctgaatgtagttgtttgttggtcttgcagcnccgtcctgcccgggacaccagccgcccacccctgaggctgcctgtgggcctctggcttttcctgtcctgcagggggatgggaaagatctggggccacgacttcctctgaggccccgcccagcggcaatgctggcattgttgtgaagtccaccctgtgtgcacacagcatccctgccctgggcccgctggttgccagtagtaannnnnnnnnnnnnnnnnnnnnnnnnnnnnnnnnnnnnnnnnnnnnnnnnnnnnnnacagtcaccctgggggacggctgctggtgagcgctcacagatgtgtgtccatagcagctgactctcctttgcatctcctccccgaggacgcagtggcaggcaggccacgcccct

SEQ ID NO: 128 - DNA, 580 bp, Homo sapiens
  misc_feature (1)...(580): n = a,t,c or g
ctagcccagtgcggtggaattcgatccgcatcgcccagggaaccgctatctactttcaggaaactttcgcagattttctccgatgagaacaaccacctcagcagcagagagattcttttccaggaggaggccactgagggatcccaagaagaggacaacaccccaggcagcctgccctcaaaaccacccccaggccctgtcccctaccttggcaccttccttacggacctggttatgctggacacagccctgccggatatgttggagggggatctcattaactttgagaagaggaggaaggagtgggagatcctggcccgcatccagcagctgcagaggcgctgtcagagctacaccctgagcccccacccgcccatcctggctgccctgcatgcccagaaccagctcaccgaggagcagagctaccggctctcccgggttcattgagccaccagcttgcctcctgccccagnttccccangnattncgacgggcggattcagncttnaccaagcgttttcagtggcgaatttgncccgagagaaaagttcattcaacttagttgggaattncgggggac

SEQ ID NO: 129 - DNA, 580 bp, Homo sapiens; identical to SEQ ID NO: 128
  misc_feature (1)...(580): n = a,t,c or g

SEQ ID NO: 130 - protein, 447 aa, Homo sapiens
MGVQPLGKYSCSKWEKLAKTKGLQAPCKSEIQWTIKSKSSKIISFDFMSHIQVKLMQNIGSHNLGQVCPCDFAGYCNSHLQVLGFIPKKERKKKNDPIDEVKVRHQMDTMAFSLTVPTLALKMPNGLDGMSLSPPGARVPLHYLETELEDPFAFNEEDDDLKKGATVRKKLQSKLAQNRQRQRETEILKVRQEHFSPPPAPSQQQPPQQHSHLSPLSTSLKPPAPPQGSVCKSPQPQNTSLPMQGVAPTTHTIAQARQLSHKRPLPLLPSSRAPTVDPPRTDRILMKATAFSPHFSCISRLQRLVKLCTQKHQLDTDLFPHLGLDWSEESGEEPEDSEQASPYQVAWSIRETLRYQRHASDDDDAESRSSRVTQLCTYFQQKYKHLCRLERAESRQKKCRHTFRKALLQAASKEPECTGQLIQELRRAACSRTRADEEVNVLLCDNL

SEQ ID NO: 131 - protein, 301 aa, Homo sapiens
MGGVESHIYQLPQCLIGRGDKVIIVIHAYGNRKGIRYLTNDLKVYYLPLKVMYNQSMAMTLFHSLPLLKYIFVQERVTIIHSHSSFSAMAHDVLFHAKTMGLQTVLTDHPLSGFAKVHSVLTNKLLTVSLCDTSRIICVSYTSKENTVLRAALITEIVSVIPNAVDPIDFTPDPFRRHDSITIVVSRLVYRKGTNLVSGTDITVDSAEKPSIIKFSVKAFVFSEQNVRGVPSQNQLLPCPFNVWFGEDLPLSPRSPLTPRHGPGLANVCQYDEWIAVRHEATLLPMQEDLSIWLSGLLGEA

SEQ ID NO: 132 - protein, 283 aa, Homo sapiens
MEAPEGGGGGPAARGPEGQPAPEARVHFRVARFIMEAGVKLGMRSIPIATACTIYHKFFCNTNLDAYDPYLIAVSSIYLAGKAEKQHLRTHDIINVSNRYFNPSGEPLELESRFWELRDSIVQCELLMLRVLRFQVSFQLPHKYLLHYLVSLENSLNRHSWQRTPVAVTAWALLRDSYHGGLCLRFQAQHIAVAVLYLALQVYGVEVPAEVKAEKPLGGRCLMTTLPSQSLIILCLISFRFIPWTQRSPKVLAQACPKRSPGWSAAWGHCQHVGMTGWSPQDP

SEQ ID NO: 133 - protein, 622 aa, Homo sapiens
  misc_feature (1)...(622): Xaa = X or * as defined in Table 6
ITTVAPSRPASSDCESDGSXEQDAGPGSRMGPEKXAGPRPTRRVGRWSQTHSQTDDTSGAVVPEYPSDRXYAGGRGPGPGGPTVHPXKRRSXNPQETKMMARRDPKSWAKRLSPVXPRLAALLTSASPSCPLEPRVLPFRVPPSHGLCEGTSYPNSPGTXRPPCRSSAKTAGPLATRPEVPGAPXSAGRQPWFQRPWGKRKGGKPETMEAPGXSQPGALEQGXGREGRETKATRPAEEGSPPHVFRETSREAAAEWKRIHGVFXSSEGHPGXFPFSFPSAGGNRGTPLSCLLGVRDSTILPGCKRANAGPHNQXEAARGPCPRXSSAAEMSGRGSVLASLSPLRKASLSSSSSLGPKERQTGAAAAHPSACSQAPGPRASPRGEADTQPPRGXLPRSSPGCLQNPRPAPGRQTPGTRQTSCGDLSSPARQPPHTAWAXAPISASGQEPRDLPSSDSGLPELPQETETGSLPDPRKRHPGRXAGGPGKSPTSASRNRTWTKYVAPDGQEDTGPGAQRRPAASAQQTLPAYCPGLHHVPSLSGQPXWGPASQSGSSGDWKTDAGAPASWRPPHFTLLRSREPSSLRALMCQRSLRLPVFVSHRASSMRTFRFPPPQRTAILTWS

SEQ ID NO: 134 - protein, 142 aa, Homo sapiens
SRYVQKELNSKSVNHVIIVRFLGLSQLRNIADGGWSSSVKMFLVNCLYPKYTHSIKGWFLFFIFSNPLFFSRCPSHTEPQNLTGVSEFLLLGLSEDPELQPVLAWLSLSIYLVTVLGNLLIILAVSSDSHLHTPIYFFQFSC

SEQ ID NO: 135 - protein, 1127 aa, Homo sapiens
MEVIPEGYRLSELKKCSKWIVVMVARLYEYTKNQQIIHLKWVNHMLGCLLDRNDPLRDVDEAAVPVLCICSADDPVCGPPDHTLTTELFHSNPYFFLLLSRHGGHCGFLRQEPLPAWSHEVILESFRALTEFFRTEERIKGLSRHRASFLGGRRRGGALQRREVSSSSNLEEIFNWKRSYTRLMAAAAGAAAAPGSREPQDRPECGAGHPGPRYYRHPERWLLRPEAFLGPLRTRAPSAEDSQRERPAARSGPEMRVRYPVVAAVLAPYLALSQDPMVKSSASGQGASGSYNHVREEMLIKAGGAMSRRVVRQSKFRHVFGQAAKADQAYEDIRVSKVTWDSSFCAVNPKFLAIIVEAGGGVPSSSCLWPRWWLAGYRCVPAHTVDDVWVHIIQAQQHLPGAHIPDDDHIVTTCPEWPGMVAGNPMAPDFSLNSFAPPFANGLPRNVLQDPPESPKAFSLPSLRLLLKCHLLRKAHPDSPSEEVRGASARPPPRLGGVPNSSLRTGHDDNRRFCGIERGERRSDSSFAKENNQKAYKETYGVSHITRHDMLQIPKQQQNEKYQVPQFDQSTIKNIESAKGLDVWDSWPLQNADGTVAEYNGYHVVFALAGSPKDADDTSIYMFIKSRDNSIDNDELNPGWASISRGVLVCDECCSVHRSLGRHISIVKHLRHSAWPPTLLQALQNFQRYTGIQHVHRIGMAERMWCDRNRERHTVSSSGATASPIQTVQLDITAFLKTVKKNKHKFYPAFIHILARLMNAHPEFRMAMKDGFIENMFFVSANPWVSFTSFDLNVANMDNFFAPVFTMGKYYTQGDKVLMPLAIQEYGWNLDRAYDYVKERRTVTKPNPSFMRQLEEYQGILLASVINHKKRKNSPRIVQSNDLTEAAYSLSRDQKRMLYLFVDQIRKSDGTLQEHDGICEIHVAKYAEIFGLTSAEASKDIRQALKSFAGKEVVFYRPEEDAGDEKGYESFPWFIKRAHSPSRGLYSVHINPYLIPFFIGLQNRFTQFRLSETKEITNPYAMRLYESLCQYRKPDGSGIVSLKIDWIIERYQLPQSYQRMPDFRRRFLQHIFVLRERPETVLIDLIQRTKDAVRELDNLQYRKMKKLLFQEAHNGPAVEAQEEEEDD

SEQ ID NO: 136 - protein, 22 aa, Homo sapiens
  misc_feature (1)...(22): Xaa = X or * as defined in Table 6
IALRYXEXYHPLPPCILGTTSQ

SEQ ID NO: 137 - protein, 96 aa, Homo sapiens
MYVKLISSDGHEFIVKREHALTSGTIKAMLSGPGQFAENETNEVNFREIPSHVLSKVCMYFTYKVRYTNSSTEIPEFPIAPEIALELLMAANFLDC

SEQ ID NO: 138 - protein, 107 aa, Homo sapiens
ISRGGVVEVSGDPELQPVLAGLFLSMCLVTVLGNLLIILAISPDSHLHTPMYFFLSNLSLPDIGFTSTTVPKMIVDIQSHSRVISYAGCLTQMSLFAIFGGMEERHA

SEQ ID NO: 139 - protein, 445 aa, Homo sapiens; identical to SEQ ID NO: 53

SEQ ID NO: 140 - protein, 514 aa, Homo sapiens
ALHEFGTSGCFKSLALIQATDSRILQAGNILEIRVGQAGARRVATMTSPVLVDIREEVTCPICLELLTEPLSIDCGHSFCQACITPNGRESVIGQEGERSCPVCQTSYQPGNLRPNRHLANIVRRLKEVVLGPGKQLKAVLCADHGEKLQLFCQEDGKEKFQESLKKLKNEEQEAEKLTAFIREKKTSWKARETFSEDVLGQESWQSTNARENAGIPGLEAAHFWIAIPFCAMYLVALVGNAALILVIAMDNALHAPMYLFLCLLSLTDLALSSTTVPKMLAILWLHAGEISFGGCLAQMFCVHSIYALESSILLAMAFDRYVAICNPLRYTTILNHAVIGRIGFVGLFRSVAIVSPFIFLLRRLPYCGHRVMTHTYCEHMGIARLACANITVNIVYGLTVALLAMGLDSILIAISYGFILHAVFHLPSHDAQHKALSTCGSHIGIILVFYIPAFFSFLTHRFGHHEVPKHVHIFLANLYVLVPPVLNPILYGARTKEIRSRLLKLLHLGKTSI

SEQ ID NO: 141 - protein, 47 aa, Homo sapiens
MGRAPTPSVDALGEPDRRGAQEVQGEAAVGAAARGLSMDALDLTDKL

SEQ ID NO: 142 - protein, 640 aa, Homo sapiens
MTTSALRRQVKNIVHNYSEAEIKVREATSNDPWGPPSSLMSEIADLTFNTVAFTEVMGMLWRRLNDSGKNWRHVYKALTLLDYLLKTGSERVAHQCRENLYTIQTLKDFQYIDRDGKDQGVNVREKVKQVMALLKDEERLRQERTHALKTKERMALEGIGIGSGQLGFSRRYGEDYSRSRGSPSSYNCEDMMVIAASSSSPRYTSDLEQARPQTSGEEELQLQLALAMSREEAEKPVPPASHRDEDLQLQLALRLSRQEHEKEVRSWQGDGSPMANGAGAVVHHQRDREPEREERKEEEKLKTSQSSILDLADIFVPALAPPSTHCSADPWDIPGFRPNTEASGSSWGPSADPWSPIPSGTVLSRSQPWDLTPMLSSSEPWGRTPVLPAGPPTTDPWALNSPHHKLPSTGADPWGASLETSDTPGGASTFDPFAKPPESTETKEGLEQALPSGKPSSPVELDLFGDPSPSSKQNGTKEPDALDLGILGEALTQPSKEARACRTPESFLGPSASSLVNLDSLVKAPQVAKTRNPFLTGLSAPSPTNPFGAGEPGRPTLNQMRTGSPALGLAGGPVGAPLGSMTYSASLPLPLSSVPAGLTLPASVSVFPQAGAFAPQPLLPTPSSAGPRPPPPQTGTNPFL

SEQ ID NO: 143 - protein, 32 aa, Homo sapiens
QVFRLSHAWPKIPFLGIHEATNPRSENTRLAT

SEQ ID NO: 144 - protein, 216 aa, Homo sapiens
GRRVYYDEGVASSDDDSSGDESDDGTSGCLRWFQHRRNRRRRKPQRNLLRNFLVQAFGGCFGRSESPQPKASRSLKVKKVPLAEKRRQMRKEALEKRAQKRAEKKRSKLIDKQLQDEKMGYMCTHRLLLLGAGESGKSTIVKQMRIPDVNGFNGEGGEEDPQAARSNSDGEKATQVKDIKTTWKKPLNPCGRLTKPVPPVSWPPPKPIQRDYFLMD

SEQ ID NO: 145 - protein, 2816 aa, Homo sapiens
RKALLKGQLKSKKNYFSNSPWDIEEKGTGGFGASSLKTDWREGGGGARWLNRTPPEIVLHTGTPNRTTIHARQHLHKSHKIRLHSRKENPCAWRRESKVLMLGERFLLLGERREKSTEDFVLQLGYQLSHNTIKHQTDSRSPRFQALFLDSVSRPILGQKGIHCPVGKGSNAQGGNKCDIIEYLVWLMSGSPFLNRAGARLAEMTTRQMADWEDKLKSATMATAPYNYSYIFKYIIIVMADCPHTIGVEFGTRIIEVSGQKIKLQIWDTAGQERFRAVTRSYYRGAAGALMVYDITRRSTYNHLSSWLTDARNLTNPNTVIILIGNKADLEAQRDVTYEEAKQFAEENACHVSLGHVSLLGLAFKALHNQPNTERTVTMAVKFNMSFGGDTKTIALSFGRKEGNERERYGKSELQDISKLKPLQDLISLILVENPVVTLPHYLQFTIFHLRSLESLEGQPVTTQDRQEAFERFSLVLEILARAIRQEKEIKDVHLGKEEVKLSLFADDVIVYLENPIVSAQNLLKLIRNFSKLSGYKINVQKSQAFLYTNDRQTESRIMSELPFTIASKRIKYLGIQLKRDVKDLFKENYKPLLNEIKEDTNKWRNIPCSWIGRINIMKMAILPKVIYRFNAIPIKLPMTFFTEFEKTTLKFIWNQKRACIAKTILSKKNKAGGITLPDFKLYYKATVNKTAWDMVEAGNHHSLQTVTRTENQTPHVLTHRWELNNENTWTQEEVERLERDLEKKMIETEELKSKQTRFLEEIKNQDKLNKSLKEEAMLQKQSCEELKSDLNTKNELYAEIDKAPDESPYIGKSRYKRNMFATESYIIDSAQAVQIKKMEPDEQLRNDHMNLRGHTPLDTQLEDKEKKISAAQTRLSELHDEIEKAEQQILRATEEFKQLEEAIQLKKEAVVQYRQEMILAPTRKVLVDVERKPADSRKHWTVELTGLNDGLKVGDELSGRLQLVNKLRQEALDLELQMEKQKQEIAGKQKEIKDLQIAIDSLDSKDPKHSHMKAQKSGKEQQLDIMNKQYQQLESRLDEILSRIAKETEEIKDLEEQLTEGQIAANEALKKDLEGVISGLQEYLGTIKGQATQAQNECRKLRDEKETLLQRLTEVEQERDQLEIVAMDAENMRKELAELESALQEQHEVNASLQQTQGDLSAYEAELEARLNLRDAEANQLKEELEKVTRLTQLEQSALQAELEKERQALKNALGKAQFSEEKEQENSELHAKLKHLQDDNNLLKQQLKDFQNHLNHVVDGLVRPEEVAARVDELRRKLKLGTGEMNIHSPSDVLGKSLADLQKQFSEILARSKWERDEAQVRERKLQEEMALQQEKLATGQEEFRQACERALEARMNFDKRQHEARIQQMENEIHYLQENLKSMEEIQGLTDLQLQEADEEKERILAQLRELEKKKKLEDAKSQEQVFGLDKELKKLKKAVATSDKLATAELTIAKDQLKSLHGTVMKINQERAEELQEAERFSRKAAQAARDLTRAEAEIELLQNLLRQKGEQFRLEMEKTGVGTGANSQVLEIEKLNETMERQRTEIARLQNVLDLTGSDNKGGFENVLEEIAELRREVSYQNDYISSMADPFKRRGYWYFMPPPPSSKVSSHSSQATKDSGVGLKYSASTPVRKPRPGQQDGKEGSQPPPASGYWVYSPIRSGLHKLFPSRDADSGGDSQEESELDDQEEPPFVPPPGYMMYTVLPDGSPVPQGMALYAPPPPLPNNSRPLTPGTVVYGPPPAGAPMVYGPPPPNFSIPFIPMGVLHCNVPEHHNLENEVSRLEDIMQHLKSKKREERWMRASKRQSEKEMEELHHNIDDLLQEKKSLECEVEELHRTVQKRQQQKDFIDGNVESLMTELEIEKSLKHHEDIVDEIECIEKTLLKRRSELREADRLLAEAESELSCTKEKVCLLVVWGVSSVWTKNAVEKFTDAKRSLLQTESDAEELERRAQETAVNLVKADQQLRSLQADAKDLEQHKIKQEEILKEINKIVAAKDSDFQCLSKKKEKLTEELQKLQKDIEMAERNEDHHLQVLKESEVLLQAKRAELEKLKSQVTSQQQEMAVLDRQLGHKKEELHLLQGSMVQAKADLQEALRLGETEVTEKCNHIREVKSLLEELSFQKGELNVQISERKTQLTLIKQEIEKEEENLQVVLRQMSKHKTELKNILDMLQLENHELQGLKLQHDQRVSELEKTQVAVLEEKLELENLQQISQQQKGEIEWQKQLLERDKREIERMTAESRALQSCVECLSKEKEDLQEKCDIWEKKLAQTKRVLAAAEENSKMEQSNLEKLELNVRKLQQELDQLNRDKLSLHNDISAMQQQLQDLVDTGLALTTSSKDGFISSFHLFFHLKDLLHTTKHQDVLLSEQTRLQKDISEWANRFEDCQKEEETKQQQLQVLQNEIEENKLKLVQQEMMFQRLQKERESEESKLETSKVTLKEQQHQLEKELTDQKSKLDQVLSKVLAAEERVRTLQEEERWCESLEKTLSQTKRQLSEREQQLVEKSGELLALQKEADSMRADFSLLRNQFLTERKKAEKQVASLKEALKIQRSQLEKNLLEQKQENSCIQKEMATIELVAQDNHERARRLMKELNQMQYEYTELKKQMANQKDLERRQMEISDAMRTLKSEVKDEIRTSLKNLNQFLPELPADLEAILERNENLEGELESLKENLPFTMNEGPFEEKLNFSQVHIMAQLRHCMSKQAEVLIKGKRQTEGTLHSLRRQVDALGELVTSTSADSASSPSLSQLESSLTEDSQLGQNQADSVRIELNKRTCSWCPLKKYLVYGATTLTCLMSQVLYCVVRQ

SEQ ID NO: 146 - protein, 341 aa, Homo sapiens
AHLLLFMHTRKRLTQLFCFPDLTEERLGDGKSADNTEVFSDKDTDQRSSPDVAKSKGCFTPESPEIVSVEEGGYAVQKNGGNPESRPDSPKCHAEQNHLLIEGPSGTVSLPFSLKANRPPLEVLKKIFPNQKPTVLELILKGCGGDLVSAVEVLLSSRSSVTGAERTSAEPESLALPSNGHIFEHTLSSYPISSSKWSVGSAFRVPDTLRFSADSSNVVPSPLAGPLQPPFPQPPRYPLMLRNTLARSQSSPFLPNDVTLWNTMTLQQQYQLRSQYVSPFPSNSTSVFRSSPVLPARATEDPRISIPDDGCPFVSKQSIYTEDDYDERSDSSDSRTLNTSS

SEQ ID NO: 147 - protein, 134 aa, Homo sapiens
VGWTPPTDVSPLQTWRDTVQPELHQPAGSSTPALGSVGNQKHSSGTPSNAPKRQKVEELGPHPGAEPAPVQPAPHHPAQLPLELPQRTKSRSGDKGLRPRLRASLWGAPVPRPGPAPWRGAPTSRDVTELPWRR

SEQ ID NO: 148 - protein, 303 aa, Homo sapiens
  misc_feature (1)...(303): Xaa = X or * as defined in Table 6
WKPPGELRAPVPLSPGTSSGCPRTSPRRPRSAASPSDALGSRGRSAPSPSSPYPPAGQGGANGWACHPHRSHAVPRPPAAPGAEPGRRPCTWDPCPEPPXESHXPPRPSAVDASGQPPPPAGPGQEGVGPSLPSQAQGWGCWSPPPGRPPVLPEAEGLLPEQSPAGLLQDKDLLLGLALPYPEKENRPPGWERTRKRSREHKRRRDRLRLHQGRALVRGPSSLMKKAEPLRSPGAGCSHRRNPPPAWRPPCSFSPPLRQHLPQKSPXSCPSPPCGPSRHSPGLTGRXCPRWTWPCSTGPIMKT

SEQ ID NO: 149 - protein, 69 aa, Homo sapiens
SIITPSLARGDCEQSPTSSRTSSLGSGGPDCAITVKSPGREPGRDHLNGVAMNVRTGSAQADGSDSEKP

SEQ ID NO: 150 - protein, 62 aa, Homo sapiens
SFSFIKGQIPHAFCLRDYWVQSPIEEMILRAQVKMQFKSIVCRITFCPFGLQFNVSCIHFIQ

SEQ ID NO: 151 - protein, 62 aa, Homo sapiens; identical to SEQ ID NO: 150

SEQ ID NO: 152 - protein, 436 aa, Homo sapiens
  misc_feature (1)...(436): Xaa = X or * as defined in Table 6
AWWGGGARCVQRSPMGSEAAMGLDALVPLAVTVAIFLLLVDLMQQHQRWTARYPPGPLLGGPWPDGGPDPTEALTLPLQLRHRFGDVFSLQLAWMPVVVLNGLAAVREALVTCGEDTADRPPAPIYQVLGMGGGGRGQGLHDHAHVSVPPPGVFLAHYGHAWREQRRFSVSTLRNLGLGKKSRELGRWRTGKATPDPHLPPPGRPFHPNGLLNKAASNVIASLTCGCRFEYDDRCRMWRSFGGFPVLSPEYPLSPAQAKGNPESSFNDENLRMVVADLFFAGMVRVCPGRVQQIDNVIGQVWXPEMGDQARMPCTTAVIHEVQRFGDIVLLGGPSILESSPHSHPASPAQGMMLFTNLSSVLKDEAVWEKPFRFHPDGVLQGYHPGARLTDAPPLPTGRRACLGEPLARIELFLFFTSLLQHFSFSVPTGQPRPSH

SEQ ID NO: 153 - protein, 75 aa, Homo sapiens
SLVNNTLGLRRVPSVHIGSKDGPTATTANLLQNFRELLPRHLQLSQGRCGSSQKVFHGCLLKWQSHISSMSCFPA

SEQ ID NO: 154 - protein, 228 aa, Homo sapiens
  misc_feature (1)...(228): Xaa = X or * as defined in Table 6
MLGDATWYAEKQQAKRDRDKGTLEQRPEGNVGMLGEEPSRAIGQVPKLSCMDSQQEDLRFPGMWVSLYFGILGLCSVITGGCIIFLHWRKNLRREEHAQQWVEVMRAATFTYSPLLYWINKRRRYGMKCSHQHGPCPCCHQDXDXGPESRCSVGFGHPRRQEPCXPRQQPQGGSPCSPATCTELAPQQPQARSPFPLPIFQERALCPTLVQPTPPAEPLCLLSFGHLS

SEQ ID NO: 155 - protein, 86 aa, Homo sapiens
YPVLTLKNRGGPLYTVEPVPPTGERFPSPRPSPPSYTPSPSFPTRKWGNGKSHSNSFPPIRPATVPPPTAPKPQKTILRKSTTTTV

SEQ ID NO: 156 - protein, 287 aa, Homo sapiens
MLVRLVARRTRQSHAEKKDHRGKTAVYKPRREASENNPADTLISAFQPPEGEKIHFCDDTQPMVAEMHGELIEFNERLHRALVAKEALVSQMRQELIDLRGPAADCVSPGDSDQGLLSASLMPRTSLSHGEATGYIHETSNENIVSKPCRLIPPFPLPNRPIFLINFNSSLKTQVKRLLFETFHDIPQQPQSMEKLSSTKLVPGAKMVGNCCFIFFVCTVGAMPPNLEGGCEVKDNDSNQATSEPTNKDLRGTFCAGLFCALGIYSGGQRDKMAAPKECRLNKQFSK

SEQ ID NO: 157 - protein, 184 aa, Homo sapiens
MAEATNKFKLMNGNTLVNVLYITQQFAGEAHDPLVEALVTEAWGRLERFDIKLLSEFSSCLADQHLYFSPLMGKIADIVHRNLETIQNLSSLSVLMVNISSLISRHFQEQLVNKTELVFDTTDSSEVNVAKRMVQFLRNFRYHYQPLLESFVKFFVALGPIAGPEEKKQLKSTMLLMSEELTNE

SEQ ID NO: 158 - protein, 57 aa, Homo sapiens
MVLPFTAITLQNVQGGPHCIILCFCHTEVTLITTSPELLSSDKSSWGLIRLNRCNNT

SEQ ID NO: 159 - protein, 117 aa, Homo sapiens
MPPRRIIVEVKVLDVQKRRVPNKHYVYIIRVTWSSGSTEAIYRRYSKFFDLQMQMLDKFPMEGGQKDPKQRIIPFLPGKILFRRSHIRDVAVKRLIPIDEYCKALIQLPPYISQCDE

SEQ ID NO: 160 - protein, 261 aa, Homo sapiens
MSAYLQMLILGQSSQLPSQVLQTADYCWGKPPSCAGVVPIHGLHPGVCMLRGQWSLALNEYGNHQLGYQIQPRFWCHNPRSWRVRIHRGEGIEEMRGRRGKKRREEKRERVRMTSSVPSVLQLWKIVPNGSSRNHIHKKAPVPEIESSEFYLFMCTHETDLKHSQMCPLLMGVDGSPASLDYCEPPEYAETPTAQYLPKWLPAGAPAMGLHSFVLGTQGPGGVDSQRDYLFWGLQKSVGKAQFSGRLAEESMASVAWAVLK

SEQ ID NO: 161 - protein, 222 aa, Homo sapiens
  misc_feature (1)...(222): Xaa = X or * as defined in Table 6
MLCSTAVPKAELLPGGNLGGAGEAGEGAGQPRGAPAHGQLPAXHGGLGAGHPPSHLGPAGRSAQGFSPARAPGAXELGSPGRGNGLQPQPPSPTPADGTATGAVYQNKGPSSCLIXGGLGCSELAGPWAVGMPGSVGTGPRGGAGRGGRAAGKTLPARVPGIPAAAAPPRXARHGPDAGRAGLLRDAATARRRPADCSPAAQPTAPHAGHASVGVCRHPCLR

SEQ ID NO: 162 - protein, 41 aa, Homo sapiens
  misc_feature (1)...(41): Xaa = X or * as defined in Table 6
YKSSXSDKLRSKIFSPHQRLHVLMTLETGQPRLLGSWNHGV

SEQ ID NO: 163 - protein, 264 aa, Homo sapiens
  misc_feature (1)...(264): Xaa = X or * as defined in Table 6
GIKPASFNKVTDPEVKEIIEGCIRQNKSIRLSIRDLLNHAFFAEDTGLRVELAEEDDCSNSSLALRLWVEDPKKLKGKHKDNEAIEFSFNLETDTPEEVAYLXVKSGFFHESDSKAVAKSIRDRVTPIKKTREKKPAGCLEERRDSQCKSMGNVFPQPQNTTLPLAPAQQTGAECEETEVDQHVRQQLLQRKPQQHCSSVIGDNLSEAGAASVIHSDTSSQPSVAYSSNQTMGSQMVSNIPQAEVNVPGQIYSSQQLVGHYQQV

SEQ ID NO: 164 - protein, 310 aa, Homo sapiens
ETLPSNTMASNVTNKTDPRSMNSRVFIGNLNTLVVKKSDVEAIFSKYGKIVGCSVHKGFAFVQYVNERNARAAVAGEDGRMIAGQVLDINLAAEPKVNRGKAGVKRSAAEMYGSVTEHPSPSPLLSSSFDLDYDFQRDYYDRMYSYPARVPPPPPIARAVVPSKRQRVSGNTSRRGKSGFNSKSGQRGSSKSGKLKGDDLQAIKKELTQIKQKVDSLLENLEKMEKEQSKQAVEMKNDKSEEEQSSSSVKKDETNVKMESEGGADDSAEEGDLLDDDDNEDRGDDQLELIKDDEKEAEEGEDDRDSANGG

SEQ ID NO: 165 - protein, 125 aa, Homo sapiens
  misc_feature (1)...(125): Xaa = X or * as defined in Table 6
XEKSHRVDPQVKVKRHASSANQYKYGKNRAEEDARRYLVEKEKLEKEKETIRTELIALRQEKRELKEAIRSSPGAKLKALEEAVATLEAQCRAKEERRIDLELKLVAVKERLQQSLAGGPALGLS

SEQ ID NO: 166 - protein, 377 aa, Homo sapiens
  misc_feature (1)...(377): Xaa = X or * as defined in Table 6
GRVGFFFAGNPGSDSFGGLLLGLTPVLRWVADGGTIPKRHELVKGPKKVEKVDKETELVAQWNYCTLSQEILRRPIVACELGRLYNKEPVIEFLLDKSAEKALGKGSISHXNALTNCXQSXKLSDNPCPGKGIKGNTKGDKHDDLQAGASFICPLVGGPGRWNGRHRFLLPSGGCGLCCFSXAEPWKEIKAEFCHTCGAAFPGRMMIIVLNGTKEDVDVLKTRMEAEKAVERSFKRISKKPKAAESVSKTQMSVEGSPRAHQKLRPGKPXRSPALDSREKKTNLAPKSTAMNESSSGKAGKASVWSHKEVHRXPVTESEAYKSLFTTHSFRQALPRRSLAHWGSPHTSYLLLKPALPPAPAPEGCLSFHVGQVRLCL

SEQ ID NO: 167 - protein, 347 aa, Homo sapiens [sequence omitted]

SEQ ID NO: 168 - protein, 110 aa, Homo sapiens
  misc_feature (1)...(110): Xaa = X or * as defined in Table 6
PGSTISCGGHVRSCVWGLLPYIPPREQVTLLAMKPGPPAQRGLSPQQGPRLPLCKAPAPPPKACPSGXTXPEQSGCSVRSRRWLSPSRSASCSRNPSPSPRCTSATPPAT

SEQ ID NO: 169 - protein, 149 aa, Homo sapiens
  misc_feature (1)...(149): Xaa = X or * as defined in Table 6
HLHVQGTSLYPAXPALREADGVPQQPWALLSLGSQNNSVWNVQLPAGPHGGAHLQPAPEPHPRILPVLLXEDPPTGGTQGSPVHVWLPAPIQSDGPQPGSQPVPDATLAGAQHPCQPSCSLLQSGLQGQELVLQGGCGRRPWTYHVRPT

SEQ ID NO: 170 - protein, 43 aa, Homo sapiens
  misc_feature (1)...(43): Xaa = X or * as defined in Table 6
XGWERSGATTSSEAPPSGNAGIVVKSTLCAHSIPALGPLVASX

SEQ ID NO: 171 - protein, 61 aa, Homo sapiens
EEEEGVGDPGPHPAAAEALSELHPEPPPAHPGCPACPEPAHRGAELPALPGSLSHQLASCP

SEQ ID NO: 172 - protein, 61 aa, Homo sapiens; identical to SEQ ID NO: 171
